United States Patent Application Publication US 2026/0258423 A1 - sequence listing, part 33

SEQ ID NO: 167803 - DNA, 46709983 bp, Homo sapiens (residues 43,373,565-45,041,778 of 46,709,983)
  source 1..46709983: mol_type = genomic DNA
attaggtttaagagccttgacaaatggtggtgtttgctggggacggaagtggttgggggaggaggggctttcagtgaagatccgaagttcctgtgagatgtatccaaggactgatgcccgtgagatgccaggaccctggggctccgtcgtcctcaggcctgggcccacagggctctgcaccagaccttggagcccctggcccagcacaccccactagcggggcccctgaccctgccccacccaggctcaggacccactgaccgtctgctggggccagtccctcagccacatcttccagcccggccacctggcccctgctcgggccaagcgttcagactacaaaggtgtttgctgtttgtctgaaattcaaactgagccgggcatttgtggtgtcttctctgtcaccccatggaggaccccactggagtctccgttcttaggatctgtaggaggccatgacccaggcagccgcggctcaccccgcatacaggcaaaaggagaaagctccagctccagcaacctgagttcaccttggccctcctgtgcccagaggcagggctcttacagtgaagggtctgtgcctcttccccaggcaggcgtgtgtcttcctcggcttcctgtggtccctgtcttgtgctggggacccctcacaggcctgctggccctgggatccggctctagttcagaggaggctgccaaaaggcaactgggctgctctgagcacagggtgaatctagtcaggggatggggttgacagctgctgcctgggatggggttgacagttgctgcctggggtcatctctctgggggaccctccaccaccagtgttgctgagtgtttcactcctggtccctccgcttttcccaagagggatgctccagtactccaggggtttaaacttggctcaaattgcaccagctcccaggaggaccaccagcatgtgcagaggtcaccctctggctccaatgggggctcttgtcgccccgccaccctgcccgcactctgcggtcacctcttcagagtgaccatcccctctgttggagtgggcaaaggagacgttgtcctggggcaaggggtaaaggagactatctggcctccttgcgaagtggcctgcggcccccgcccacccaagctcctgagcagtgggtggtgtgcgagtcttgccctgggaggaccctgctccaccccaggcaaggacctagcacccccagccaggacatccgcctcaccttcccgtccacagagcagcttctccaacaccatccgctcttcctgggccatcctcctgtctccctccttctgtgccgatttctgcctttcgaggccctgtctgtgattttatagagtttgggagaggagtgggagaggagcgagagaggagcagagagggaaccgggcatttgggttttgctgggagcacatggccggctcccttctttctgctatgtccatctgttccctcatgggacacacaagcaccttcctgatgcctggggcagaggtggctggaggtggccagggtttcagccagggtcatgtgcccatggtggctggtgaggagcggtgtctcacagtgaccctcccatgcagcaagggccccactgtctatggtggcacctccacagccgtgcatctgacccctggcctcagcacacatcctggccatccacatgctcaggggtgctgggtctcccgctgtgtccccgggcctagagctcatgatgctcgcaataacgtatgaatgggaggagtgaattggagccggggtcagcccagaagccgggactgaccacctggagatcaggttataaagccaccacacagggatgtcatctgagtgtccactgactcctggtgagtgttcccactgcccccgaggcaccctttgtggtctctgtcacagagaatccagcctgctccgggggtgatgaagctgagtttggggaatgctgtagccactgtgggctgtcctgggcctctggctgggcccagcgtcctaagccccaccacgcagggcacgtgacgtgcattgggttgtgtctcagtctggtttgtttggctataaaggaatacctgagactgggcaatttataaggaaaagaggtttattgagcccgcagtgctgcaggctgagaagttcaagggtgtggccctgactcccactgagggcttcccagctgtgtcacaccacggtggagaagctcaaaaggggagaggacacctgccaagaggggagatcccgagggcccaggccccaagcaccctctgtctttagggtcaccctttcaggcagggtggggacccctggggagggccgcccaccgaccgtccaccttagggccagtctcagccccatgcacgatcctcagcattgattcgtactggtggcttggagactgagcttgcgtctagtgaagggtcctgtgtaggcggccgactcccaggccccacgcccagctggggagatgaggaatggaggctgccatgggtgtcttcagggactagcctggcaaacctgcacactgtgccacatggcgctcacagcgcctggcacaggcatcaccgcctcccacagaggcactgaggtcagcgggattaggctccatccaggtcagagggagagggggcagaggcagctggaaccccccgagccatgcctctcgaggtcacgagctttcagcccccaacatagagaagagaggcctccccaactcgtcccccatgccaaaggcctccaggtgctgggagagtgaccgggggtgagcccaggcccctagacttcctcactatcatggttggttggtgccgagccctgggtacctggccctggtgccagtaagggcaggaagcccacgggccttgcctggactctgaggaggggccctccgcatcaacagctccccagccccacaagcttcactggctcctccataacccactgtcatctgcccacctcctgcagggatgaggcacctgcgggcccttccctccgctctgtcacccagtccccatcggagcccaccggctcagcccgcctgcctcctctgagctctgcaggcagatctgccctgccccctactccacctgcatgctcccagggcctccttgggaaagccccacctcgcagctccctgtgcacctcctgtatggtaggattgttggggttcttgtccctccctttccctgagggtagggaatgtgtttacatcattccgagactcctgtcccagcaggaggtcagggacacaccccaggcccctgcaggtgctgcgagcgaatacaggaggggctcaggtcagcaggctccgcacagcaaccaacccaggatcacgggaagggtgtccatggaccccttgcctcagtttccatgtgcataagagactgaggtagccaatgaacgctcagggccccttctaagtcccgccagtggcaacagggtgatgggtgttattcaagtcatcatctccactatgtaaaggtcacccgccaccctcccgtttccggaatctccgctgggtggaaaccagctttcctccccccacccttcaaggcttcctcaacttccagatggcccccaggccgtggtcctttccacaaggagggacacactccctgcattaggaggaggccatctccctccagcagccccaggtaggggcagagatagtcatgggtgcagggcctggcagaggccggcccaacagctgagagggccctttcatttttttgtggttttttttttttttttgagacagtctcgctctgtcgtcaggctggagtgcagtggtacaatcttggctcactgcaaccaccacctcctgggttcaagagattctcctgcctcaacctcccaagtagctgggtctacaggcgcgtgccaccatgcccagctaatttttgtatttttagtagagatggggtttcaccatgttggccaggatggtctctatctcttgacctcgtgatccgcctgcctcggcctcccaaagtgttgggattacaggcgtgagccaccgtgcccagctgagagggccctttcttaggatcaccgctgccagaggacacagccatggcagccatcaggcctgctgcaaacagagctggcactgaaggttttcaagccctcccatgacagagtgcacagtggtcgagggttcaggtcacccccaccaaccttggggccagaggggatggcctgacagccacccccagacctggccgcaggattctggcagcagcctctcctcagtgaaaccagcagacgagccaagggccgtcccagtcaccagcagttttgggtcccatgcacacttgggtcccttgtgcacctgttggggaggggcatgcacaactgagtcccatgcatacctgggttccatgcacacctaagtcccatgcacatctgagtcccatgcacacctgggtcccatgcacaccggggttccatgcacacctaagtcccatgcacacctgggtcccatgcacacatgcacacctgggtcccatgcacacctgggttccatgcacacctaagtcccatgcatacctgggtcccatgcatacctgggttccatgcacacctaagtcccatgcacaactgggtcccatgcacacctgggtcccatgcatacctgggttccatgcacacatgcacacctgggtcccaagcacacatgcacacctgggtcccatgcacacctgggttccatgcacacatacacacctggatcctatggacacctgggtcccaggtgcacctaagtcccatgcacacctgggtcccaggcacacctgagtcccatgcacacatgcacacctgggttccaggcacacatgcacacctgggtcccaggcacacctgggcaagctgctggctgcagtgcaggcagtgatgacaattctcctaaccaaagacccgctggcaccagcctcgtacttgatgatccttcaactctttgctgagcaccttccatgcacggccctcgggggaaaagcccttgatggaagggaggtgggcgctagagacacaggtgaggaagccaagcctgttcagtagcgatggagctacagggaaaataaagcgggagccctgggcatggtggtttaaatagggaggtcctgcaggaaggtcctgacatgctgcttttgggcaaagaccttcaggcttggagtggcatgaagcctggggtctgcacgtcggggagctgctgcctctgagacagaccccaagcagaatcagattcggggtcccagatccccaacccgccactgacggtgactcccaggccaggagtgaaacccacgctctcattgccttgatttctcagggggcttcatgaatattttggtgtctggggcacctgtggacagtggaggaggggtgaggttggccctgtgtgaggaggagtccaggagaaacctgcggttacgcagccaccttggcctgcctgacagtcaggttccgcctgaggccacagtgagattgtggtacgggaccttcctgctcggtgatcctctggaggtcagctagatgtcctctagaaagtccggcaaggcctggagttgagtggccctggctagtgtcccaggaccggcccgggcctcccgtggaggaaagggtgtccaggaggggagtcggggcagggacatacagggcatctccgacctggaggaggtccccccgctgcagaggtctctggggatgaaagcggggagtccctgtcttgaccacacctgaaccctacaggaggcttcaagggcaggtgggcggtgggctgagggggtgctgagtctttggcctctgaggcggtgccccatctgtgcggcactggggggcttcagatcagcctcctggcagccctccctgctgacccctcaaagctgtccaacctcgggggtgggggtcccgagcccccttctctagaagccccttggcccttcctggactgaggagcaacttgcggctctcccggccctgccctgtgtgtgacgggagggggactttgcctcagttttgtgcaggatgggtcacacctgcgtccagagagaatggggctgagctctgccccgttgacaattatgccccaaaaggacgctgagaatgtgcgagtgtctctcctaaaagtgctaccctttccctcggccgggagggaggggggcaggccaggacttggaggtaccgtgtgggcaagagggttgttgtcatagctcctgggtggcgggagcaggaaagctggagcccagtaggaagcagtccccaggttcccaccggctgattctagggtgagggcgagtgggcgcagaggaagtgccagcccttctggggagcccccgaggctgtagcagggccagctggaaaccacccctcagtgaacacacagcctgtgccttctggggctgggaggtcagggcacctctgcccagagggctcctaagctgcctggggagcatctcctgctggtcacgaaaccccagggagccctgggccccacccggcaggcacagagagcgctttgccacccaagaccgagttgtctccttctaacaccacggtgcacccccagaggctgcagtcaggaggggacagggcagaggtgttgtccccaagcacccttgctccacagggctggaaaagaacagaactgtctggagttactggtagttgccttgaggggcgatgagggagggcacatcgcctgccctgtggcagagaagaggcaggcgccggggccttctggaaggcggtgggggtctcgttaaccctcccagaagcagcagctttcccactgtgcaagtacaggccccccaggacctgccagaggcaccaaaaccacgggtctccgtgtgtgtgtgtgtgcatgctgtgtgcacgtgtatgcatgtgtgtgcctacgtgtgtgcctgtgtgtgcctatgtgtgctatgtgcatgtgtgtggtgtgtgcctgtgtacaggcctgtcccttagcaattgttgcaggccccattcccccgggagacaagcactcctccctgcagctgtcacctcacaccccagggccagcaggatgtctcagccccctcaccaccctgcttcggtctcccggtctgtcaactggggccattcgatgagcctcacctgaggtctctgcagacggcctgtccaggtggcaggtgacgaatgcccggacactggtggaatcctattcccggccctcccaggactcactccaactccacaggccttgggttggggcccagacacctgcccctcctcaagctttcagggaagctgaggcggcctggtctttgcaggcaggtgcagtgccatagtgcacagcaccccaccatgaccagcagctgaaaccccctttccagccgccaaggccaccccacccgacttctcacggtgtggcctcctgcggtgtttcggttttgtgtaaatggggtccccgctgccccctcccatgctcctgcactgggccatgccgagcagtgtgtggtcagggctgtcccgcctgggtgggtgtttgggggtttccggtgtgggctgtgtgggccggagctgccgagagcgggcttctgatttctggttcacggatgtgctgccgggccccaagggtgtgttagttctgcgttagccaaagcaccaagacgatgatgtccccagccggactaagaagcacggggaatgggtgtccataaagaaggagccgtgcctgggcagagggctgtgctcgcccaaggacagcgacccgcgctccccacttcctctctggggactgggggtggaggtgccccagaggccccaccaaaggcagcctgaacgggcctcctgagccaatgcagggccccaggatactgctcggcagggccctggaatcgcttccccagcccgcctgcacttggccagacaaactgtgtgttcgtttgcctgtttgtgtgcttttgtgggtgccaagctagaagccactgaatctgatctgtcccaagccacttgagcagccattcctgacacgcgccacactgggcactgccctggacacctgcggggtcagaaaggaggaaccagacgcccggacctgccccctagacccatggcctggcccgagggagaggtgcatggctggcacagatgcacggacctgccccctggacctatggcctggccagagggagaggtgcacggctggcacggacacacagacttgccccctggacccatggcctggcccgagggagaagtgcacggctcgcatggaaggccacacattcccatcttgagggcaaagacaccaggtgtgtggcaaggcaggtggtcactcgaggacactgcagaagctgccggcactccctggggccctataagcagaaaccctgcccagggacctcctatgggctccagctcacattaatttctagacagttccattgcggcttcggtgcttggttggtttgtctccctgtggtgagcactttgcccagcactggagaagttcatgggccactcgcacctgcctctgctcgctgaaggcctttttccccagaggaagagacgcctcgctctccacagctttccacttcagaggtccttggagactccacaggaaatcccaccaggaatttgggggtggaggcagctctgttcccctgcaccccagctctgggccagccccttggcaaggccccttgggggacccacgtagagggcagggggaccaggagcacccagcgtcccagagcagcccctcctctggagaagccatgactggctgaagttaaggggccttaagaaaacaagctctgtggaccttaaatgtttgctgctgtccgagaggagagtggagcaccagaagccatagacgtcggtcgggaggagctgggtgtccctccccagccccaagccaccagggatgccgaggagaacacaggctaggagaagccccctccccaccctctgcctggctccagcttccgggagacgcccaccccctcttctctccttctccttccatccttccggaggcttcccggacttccctgctctaccacacacactgttggccaaaatttacttttaagtattgatagaaaagtctcttactgatagtatcgtgtgtatttttgggataattgaattccgcgaggtgctttgttttgtttttacatgagctagtgggtctggaagaaccttccacagaggagcccccggctctgctcccaagccctgtctcttcctaactcctcggacttgaaactgcccggacacgacctctgaccctgcaggtgtgcaggggcagtttcccggaagccattcctgttctggacagctgtgaggtacccataagtgaccatgagccatctgcacagtcatcccataaccccaactagatacagtttgggtatctgtgccccccaaactgtgccaacaaggggagggtgcctggggtggggagagaggctgccgggtagagagcgtcaggtgggaaacaggactgggctacacacttttgtggagtttgcaccactcacaccactcacaccagctgccagaacacttcctgtccagggcccagcgcctctggcaggtgggagccccattcagtgaccgtggccccgccccccctcccccgagcctccaaagaaaggagccgttgtttatccagcaacaagccgtgtggatagtgaggatcccgggaggggacaaggagcaactgaacactggctccatgggacaaaggcaccggctctcagtctccagagtgtggtcccctggcttgttgagaaaccccgcgggactggggagggggaagggggcagggggcagagcaggtgtgactaggacccaatagccagcgtatgtgtggctggtgcagtgctacttccgtccccctcctgagccccccttgaatcaaatggcaccgtcacccctgcagagcgcgagaagccacccgcccgggagctgctaaacgtcattaagtccctacggtgacggtgacgcaggcactgaaagctctgagaaataggccggcagagggagggagggagggatccaggatgccaggcctttgtgtccccgtcacgccaggctcagggacgtcggggacatcgtctgagccaggaaagaaggaggctgggggctgggcccagggcaggggccctgtgtgtataggaagggaagccccgggcagggagcccagccctccgaacgcagcctgctaagggcaccgggaattaagacgtgaaaggcacacagcagaacgcgcgtgggcctcgaaaggctccctcggagctcttcatgggctggccccaggagtgttagcgagagtgcccactgttcccacccacggacccccgggccccagcagctacagcccgagccttgttcctgaggccccgcgcagtaggagaggagagagcgccacccagaacggacctcagagagggtccctccagagggcacgggcccaccctcctctgtcctttccttgctgggcatgacacagggaataaagtaactccggatagtcctttcctggggtttaaggcaattttttttttttttgagacggagtttcgctctgtcgcccaggctggagggcaatggcgtgatctcagctcactgcaaactccgcctcccgggttcaagcaattctcctgcctcagcctctcgagtagctgggattacaggcatgcaccaccacgcctggctaattttgtatttttagtagacggggcttctccatgttggtcaggctggtctcaaactcccgacctcaggtgatctgcctgcctcagccttccaaagtgctgggattacagacatgacccactgcacctggccaaggccaatttttagatacccattttagacacccatcccaggctgtgttcaggaaaaagtgaggtggggtgtcaggagctgtgtgagccttgtggtgctgagtggccatgggcaagcccctgccctctgggcctcggctgggacacaggtgtccctcccctggctggaatcatgcccagcatgggcccatccggctccgccctgccccccggcctcacctgagctcaccacacacaggcccatcagggaagcgggactgggcactccctggcacccccgagagccggggccaggcagagaggccacacaggcccacctgtgcccaggtaggcaggtcccgtagaacctggacaggtgcatgacctgggcaggggtgacagcagaaacacagctcctcattaaagagaaaacctcatcctggatgtgtgcgtgggtgtgagtgtgcttacttgtgagtgtatgggagaatgtgtgtgtgggtgtgaatgggtgtgatgtcagcgagggtgtattttgacagagagtgctgctaggtgtgtgagtgtatgtatgaaatcacctctaattgtgcatatgactgctgtgagatgatgttgggtgtctgatgggtgtgtggtgtgtgcgagatgatgtgtgggtgtctggtgagtgtgtagtgtgtgtgagatgatgttgggtgtctgatgggtgtgtggtgtgtgtgagatgatgtgtgggtgtctggtgagtgtgtggtgtgtgagatgatgtgtgggtgtctgatgggtgtgtggtgtgtgtgagatggtgtgtgggtgtctgatgagggagtgtgtgctgtgtgtaaccatgtgtctctggtatgtgtgttatgtatgtgagtgtgtggggaggttatgtctttgtggtgtgtattgtgtgtacccatgttgtgtgtgtttctctgtgtgtccatggtgtgttcacaacgtgtaccagtggtgtgtgtgtccatggtgtgtgtgtgtgtggtgtgtgtccctggtgtgtgtggtgtgcgtccctggtgtttgtgtgtccctgatgtgtgtgcatccctggtgtgtgtatgggtccctggtgtgtgtgctgtgcgtccctggtgtgtgtgcatcccttgtgtgtctgtccctggtgtgtgtccctggtgtgtgtggtgtgtgtccctggtgtgtgtgtggtgtgtgtgtccctggtgtgtgtgtgtccctggtgtgtgtgtttgcgggggtccctggtgtgtgtggtgtgcgtccctggagtgtgtgtgggtccctggtgtgtgtgtgggtccctggtgtgtgtggtatgcatccctggtgtgtgtgtggtgtgcatccccggtgtgtgtgtgtgtgtccctggtgtgtgcaggggtccctggtgtgtgtggtgtgcgtccctggtgtgtgtgggtgtccctggtgtgtgtggtgtgcgtccgtggtgtgtgtgggtgtccctggtgtgtgtggtgtgcgtccctggtgtgtgtggtgtgtgtccctggtgtgtgtgtgtctgtccctgacgtgtgtgtgtatctgtgcacacggctgcccacccacaggctgtcctggccaggtgcctggttctcccaggccctgcagaacactctgtgcggagtgggcccaggaggtgggattcctgcagagccggtccctctggccctcggggtctgcgcatcttggacagtgtcctgtgggctgctctgagcccaggcactgcttgcagggcagatgggacaccggctggaggatgcccacagcccatgggctggttgctgctgtctcccgcctgcctgccaggggcacagccgggggtttagggtgcagcctccggcccgctggctcaagtttccagaagagtctgccacagacagatctcatgtagcaaagggcagaggccagaggtggactccacacgggcctgcaatgggtgactgtgggcaagtcaccaaaccacgcagggcctcctggtcaccgaccagtcaccacccctgtcccagggtaggtgatgagacaaagcccttcccttggccctggcagagaagtgaggagcagccgctctgccttagtttataaaatgggaagaacaagtccctgagggtcaacgtttgggggaccctgcagagactgggcacaaagtgtcctgcacatctaggatcaggcaggtgatgctcagacaagttccaaacacatggggaaccaaaatgtggttgccccaaaatgtggttttggggaccccaacacctggggtgggtgggcacagcgtgctcctgtgttgctgagagccagagaggaagtctccaaccccacagggctttcctgatccgggcatctcggcccggggcctggctgctgggcgggccccaggagtgcccccatggagggccttctgggatgacattggcctgtggccacttctgcagccccagcccagccttcaggtctctcctgcttcagaagcccttggccatccccaggcacctcccggacattgcccagagcggcggccctaagacgacaagagctgtgatgccccgttggtgccgctaggactgcccagccctcctgctgctccgtggacctccggggtctgggatgggtgggtggggcccttcctggtgactggcgtttactgggcttctgtggggccaccaagcaccgacacagggtcagagtgaggagcgaaagccctgacgcctgccctcatggggagtcggtctcctctggacacggccttgttccagtgaccacagaggctggcgagtgccacgtggtccccactgcatcacacacctcccacgccctgcccggcgtcagggacaggaggctcagggaagcgaaggacactgcccaggggcacggggctggccagggctcgcccaggcctgcctgccccaaagcccagctcctctctccacccggctcctagctttgtcccaaaaagccggaaggaccagacacttggtttggggcaaaacttaagtgggagggtgctaaaaaaaaatcaagatcaataacattttagtgtaatacttttaaaaattaaaattaatgcacaattcatgatgaacgaaatgtcaaacttctaaacaagtcaaggcccgcctctgtgtggcacagccctgggggcgagtgctcagcccaccccaaacccctgggccgggctccagggaaatgctgccagcttcccacttccagcagagccagcccctcagctgtgagacggtttccacagcgaccagcccaggtagcggggaggctctccagttcaggggatgctaggagacactgggaagggggatccctgctgggaagagccaggaaggggctccacaattcctctggaggaagcacgacctccaaggatgaggagaggaaatccctccagcccaggaatttcccaagccagagctctctgcctcatgagaatggagccaccgtccccagcgccaagggaggctgctccctcccttcctccttccctcccttcctccctccctccctcccttcctcctccctgtccttgccccccgggagcctaagagctcgctacctggggtgaatgcccagtagaccgtgcagttctgattttctcacacactgcacttttggatgattacttatggatgctagccattacgaaggaagcaaaaagccgtgtgcagtgcaggactgagtttgcttgattaaaaggcctcgccagttgctgacgccctggggttgcgtctgaggggcggtgaacgtggcctccagatttctcttgctgcgaggcttgggcacatcccgatggcagttggctgtggggtgaacggggagtgccaggcaggaggcaggggcctggcaggaaatagatgttacatgcaaattgaatcacttaaggagcatttaataaaggaattacaagaacaggacagacttgggaaaccaggagggatgggtgctcaaggggcagcccgggcaggagaaccgcgtcttcccaaggcctggagagggagggcaggagccagtgccgacccaagccttgtagctgtcggtaagaaggcctggacaggagccgctccccacccctgacacacacaaaggacacagtgagtcccaagcccttggagggcagtggaaacgcccccttaacaggcaacgttcttccgagaaacagaaccagggggatttgtcccggctttcctgacatgaaaaaaacaataggcggttcatatacacgtatatatatttagacaataggcggtttacatacacatatatatgtttagagaacagacggtttacatacacggatatacgtttagacaacaggcagtttacatacacggatatatgtttagagaacaggcggtttacatacacggatatacgtttagagaacaggcggtttacatacacggatatacgtttagagaacaggcggtttacatacacggatatacgtttagacaacaggcggtttacatacacggatatacgtttagagaacaggcggtttacatacacggatatatgtttagacaacaacaggcggtttacatacacggatatatgtttagacaacaggcggtttacatacacggatatatgtttagacaacaggcggtttacatacacggatatatgtttagacaacaggcggtttacatacacggatatatgtttagacaacaggcggtttacatacacggatatatgtttagacaacaggcggtttacatacacggatatatgtttagacaacaggcggtttacctagacggatatatgtttagagatttattttaaggcattggatcccgcaatcatgggggttcaaaacctgcagggcaggcggcaggcaggagacacgcagtagggcacgtcaccgtcttgaggcaggtgttctcagtgaaacctcggttttcactcttaagggcttcctttgaagggatgagtccctcccagaaaaatcgaggctaatctccttcagatcatctgattgtggatattgagctcctctgcaggacaccttcccagctacacctgggctcatgtttgagcacttaggtactgtggcctggccaggattacaggtaatgcaaacctcatcctccccattttgcctctcccatcctgggcttctctgccagggcttcctaagggctgagccagaggcggagagggccttgggggcatgcagagagctcagcagagcaagaagaggtcagccaggctgggggtcccggcgactcaggcaggagcctgacgtttaattccaggtctgcaggaaaccatcttgagctccaggtgggagagggttccctgtgatcagattctgagcctcgggcgggagagcgttccctgtgatcagattctgagccccaggcgggaaagggttccctgtgatcagattctgagccccgggcgggagagggttccctgtgatcagattccacaaaagaagagcttcttccttcccctcccattcccagtcacccatgagacccgtggctacctggtggtggcatgtggggcaaacgcctgtgttgaccacctgggaggtttggtttcctccactagaaaactggagagctgaaaacatgtccttgtagaacatgtgaaatgacctcctggggtgcctgacgctgcccgtgcgggctctggcgatgcctcagtggcttcctaagacaccctccttcaccccgtacagtctccggtgcagagatggacgagctgggggactcaggcaatttcccccacaaagtgttgcaatggattgagaacgcctcccggagtgtctgaggccacctgcattttcagaagaaagttccactttcttcagaacagataacgtggtgctttgactgccattgttatctgctgcaccgagtcaggagaggctgggccgtgacgtgacgcagtaacaagcaaacctccaaaatctcacagcttaatcgcgctacagcgtatttctctctagggcaagcagcacacggattgtcagggccctcctccagggtcactggggggccgggttccccatctcctagtgccgccctcacagacatgcctccagggtcccacggcagagaggggcctgtggaggaggcatgcaacctctgagtgtgttggcaagccgactcatggtccttctgctcagagcccattggccatggctggtcacatggtcccaacctcacctcgagggacgctgggcctgaaggaaaacacacagaatatttagagaattctcctgcccttcctctatggaaatgtgggacagctgggcatgtctaaaattaattggtttttaagaatgttcagtaagatcccatcctgggaagaaaaccctatttaaaaatatatcatatagaatatataaaacatatacacatacagatatagactgtgtgtgttttctatttccatgtagcaaattaccccaaaactgagcagtgtaaaacaacaaaccttcattatcttacagtttcagaggctccaggatttggaagaagcccagtggggtggctgtggctcaggatctggcacgaggttgccgccaggacggcaacacctgcacgtgcgactgggctgggggatccgtttccaaggaagcttgctcacatggctgctggggagaggcctccagtcctcacaaggccattggtggaggctgcagctcctcacaggctattggcgggaggcctcagtccctggcctcataggcttctccacaaggctgcttgagcattctcctaacatggcgactgtcttcccccagagtgaccccagggagagcaaggtgggatccacaaagccatttgtgaactaggcttggacatcactcactgtcacacaggccaactctgatacaatgataccaggacgctgtgatggccaatttcatgtgtcaccttgactgggaagaggtggcgagatatttggccgcatgttctctagggtatctgtgagctgtctctgggtgagatcagcatttgagttgaaggactgaggaaagtccatggctgtcccctgcgtgggcgggcatcctccaatcccttgaaggcctgagcagaacaaaaggctgagggagggagagcccactttctctgcctgaaggtcttcaagctgatgggatcttgtccagccttcagatttgaactcggctgcatcatcagctctcctgggtctcaggccttcagactcagatggtgacataggccctcctccgtctccaggtggcaggtctcaggacatctcagcttctgtaatcacatgagccagttccctggaataaataaacccgtctcctactgcttctgtttctccggagaaccctgatgaatacagctatggaggctggcggggaagaccccagagacatcctggaggctcccacagagagaggggggtggtgcagggttttatttccagtaggaattttactagagcagcggaattgatgactaaggtccacagatgaaaatgacagaggttccaagcaacccccaacaccacccagcacaatctccacattctaagaaactcattagacccagacacacagcctgcagggctgagcaggactgacccgccagtcacccagccgcagccccagcctctgtgtggggatagggaggtcggagtcatcagagctggtggctcatcagggtaccagcccagagggtggaggggagcgagcaggagagcacgcacacctctgtccccaccccaagtctggagagacagcagcctcaccccggggcaggggagcatgagcaggacagaagattcgagctttcagctgggctgggctgcatttccacagttaaaagtgagcagacggccgggtgcggtggctcaacgcactctgggagaccaaggcgggtggatcacaaggtcagtagttcaagaccagcctggcccacgtggcgaaaccctgtctctaccaaaaatacaaaacattagccaggtgtggtggtgggtgcctgtagtcccagctgcttgggaggctgaggcaggagaattgcttgaacccaggagacggaggttgcagtgagccgagatcacaccactgtactccagcctaggcaacaaagcaagactctatctaaaaaaaaaaaaaaaagaaaaagaaagtgagcagactcaggggagtctgtcccaggggctgtaagggacaaggaggggagtatgacggggctggctgaaagctgcgattggccaaaagaaagtagtctgtactcatcccagggctgaggctgggccagcaatagtatgtagacagcacggcccaggcaggtgacggtgtgtagacagcacggcccaggcaggtgacggtgtgtagacagcacggcccaggcaggtgacggtgtgtagacagcacggcccaggcaggtgatggtgtgtagacagcacggcccaggccggtgtcggtgtgtagacagcacggcccaggcaggtgacggtgtgtagacagcacggcccaggccggtgtagacagcacggcccaggccggtgtcagtgtgtagacagcacagcccaggcaggtgacggtgtgtagacagcacggcccaggcaggtgacggtgtgtagacagcacggcccaggcaggtgacggtgtgtagacagcacggcccaggcaggtgacggtgtctagacagcacggcccaggcaggtgacggtgtgtagacagcacggcccaggcaggtgacggtgtgtagacagcacggcccaggcaggtgacggtgtgtagacagcacggcccaggcaggtgacggtgtgtagacagcacggcccaggcaggtgacggtgtgtagacagcacggcccaggcaggtgacggtgtgtagacagcacggcccaggccggtgtagacagcacggcccaggccggtgtcagtgtgtagacagcacagcccaggcaggtgacggtgtgtagacagcacggcccaggcaggtgacggtgtgtagacagcacggcccaggccggtgtcggtgtgtagacagcacggcccaggcaggtgacggtgtgtagacagcacagcccaggccggtgtagacagcacagcccaggccggtgtagacagcacggatgcagccgggctccagctgctcggccatgtccgtggcctgcagaattctaagaaaaacaatgacaggtagtgtgtgtgttcatccattctcgcattatataaagaaatacacaaggccgggtgcggtggctcacgcctgtaatcccagcactttgggaggccaaggcagccggatcatgaggtcaggagatccagaccatcctggccaacatggtgaaaccccatctctactaaaaatacaaaaaaaaaaattagttgggtgtgctggtgtgcacctgtagtcccagctacttgggaggctgaggcagaagaatcacttgaacctggaaggcggaggttgcagtgagctgagattgcaccactgcactccagtctggcaacagagtgagactccatctcaaaaaaaaaaggaaggaaggaaggaaagatggaagagagagagagaaagaaagagaaggaaggaaggaagaaggaagaaaggaaggaaagaaagaaagagagagggggaaggaaggaaagaagaaagaaaaaaagaaagaaagaaagaaagaaagaaagaaagagaaagaaagaaaagaaagaatgaaagacagacagacatgagactgggtaatttgtaaggaaagaggttgaattggctcatggttctgctggctgtacaggaagcatagcagcatcagcttctgaggaggcctcaggaagcttccaatcatggcaggaggcaacaggggagcaggtgtgtcttccatggccagagcaggaggaagagagaagagagagtgggggcaaggtgcacatgctttaaaatgaccagatctcacgagaactcactgttgtgaggacagtaccaaggggatggtcctaaaccattcatgagaaatccacccccatgagccaaccgcctctcaccaggccccacctccaacactgggaatgacaattctgcataaagtttgggtgagacagagccaaaccttgtcagtgtgcatgtatttgtctgatttaaggagctaatttatagcccagtaaataaaaagagaagatgaagaaaggagttaggaagggaaacgttcagacagagtgagctagaaacccgtccgactactgcaaactggggttggtgctgtttccccacaattaagagtaggtggggcctagggtgtctttgcaatcctgtcgctgcagctcctcgtggggtgggggcaggctcagtagcccctgctgagcagagggcctctccaggccctcagggacagagggccttgggaggatgcacccccagccagtgcagggaggctgaggaagctcccactcaatggcaaccacattcatttggcctcacagtccaccccgggacttgggcggtcctgttagcaatgacaggcagcagaaagcgtttccatgtaaattcctacaaagctctggctctcttgctccggcttctatgattggagcctggaacacggattcgaaggaccttcagtcagaaaggggacctgccaccttcacggcagcacccagagagcagcttccacggggctggatccaggaccctaaaccatggccccgaggctctgcccctctgcccaggctgacgccacgtgtcctgcccagaataaccaaggcaaccagtgaccgtgtccggttcagatctgctctcccactgttcccaaatgagcttcgcaggccagaggttttgacttggaactgagcgagatgaaaactgtgagaagggccccagggcaaggaagcccttccctcccccgcggtcaattctgctgcaaaatttattcctgtccctccaggccaccagcggagggagagccaaggcccaggaggctgcatgaagaaaccccggccaccacaccgtgtccccagggcccacatgctccactctctttggtcaaagagtccctggtgcagcggggtgactggtccataaagattgtgtccacttatgcgccaggcacgggcaaggggctggggataccgagagcctggaaatgcacaaccctccatcacagtgctcgcccatttggctggggaggtgcacacactgcccagcctccgtcctcccctttgcaaggcagcagataagtctcccttttctataggctgaccctatcctgttataaggaggcgcgtgctccctcgccagccgcagtgatcagtcctgggagctcacacagcccaagctacaccattggaagtccctgggagacttgtccacagagtgaagggaaaaacggcctcttctcatcagggctgctaacctgggattgccagaggccatcccccactgcatggagagagagctgacaccctgaatgaagtcaagtaaagacaagcagggctgagatgccgggagagagacagagctttgagtgcattattgaggtcctggatccagccatgcctgcagctgcgcctgggtgagatagttataataagccaacaggctcccttttggcttacgttcatctgagttgggattctgcaccaagagagctctccctaccgcagataggacagcactcctgcagtaatgccggattaatacaataggtgcgcagacaggggtgtgcagaggtgctgtggaaataaggcggtaggcaggactcaggtcttaaaggatgacagcagctctccaggcaaaggccctcagagggttccaggcaagaaaactgcatgagcctcagggagaggcaagggagcaggtcggggcacatacagttcacagtggccatgagggccgcatgcaggccacaggcagtggagggggcgggtgcaggaaggcagagggtgatggtgggagcagcacctccactttccatcttggagcagagaggtggttaaacacccacgacacacactcacagcaaccagacataattcacaaatagcccctcctgtgttctctcccagcagtgtgagggggacgcagaaccagtgtctcctcttaaaatccccgaaccctcccgctggctggccctgagcagcaaagaggacacctgcgcggccttcctctcccggcccctaactgagccacggctacatcccgctcctcccaccaaagctcttcggccagtcagccctcaggctccagcgcggctcggaggggcctgcccctggtatagcgcccatggtcactgtcggacactcttaaaacaacggccgtgtttctgttctgcgctgggccctgaagctcatgtcatcagccctgccggctgtggggctcccggattctctgaccttgacccatgctgcagccactccgcctgtttcctggggctggtttacaccccgagatgcagggaaggcccagctgcggagccccagggaggccaggagctgttcacaactccaggaagccacactgggcctcagttgacgaagaaggcgacaccttcgtgtgggccttgcctgctaatcggtgtcctcaacccaagggcacaggcgccgctcccaggccgcgcaggcagagtagagctggggtggatggcaggcttcagggacccagccccgatgagtcacttggaaggcatttgccccagagcttccctggccactgcgcctcctcccgccccaatccagccccatctgggtccgagcctctggagaggagctggcaggtcaggatgcggttcccgtgctcttgcctgtgtgtggggacccgaaagccaggctggtggccgaggatggcgagcacagccccagcccctcggcctagcgggagcttcacgggacggtgctccccccacaccgtggtgttgcttctgtggcccccttcagggcccacagagggaaggggcctggctctcccacggggcctctgtaatatttaaccataaaccaaggctgcggggaacccccagtttgcagtaaacttccatttctctccactggatgcgcaggactccactcagccaggtaggagaatctgcactcacctggtttccggagcaaggaggctgatggcatcagggactacctcccctcagcttcctcgggccacgcaggagtccccggcccgcctcctccaagacagtgtgcgcattttgcccgagacaacacgggcctcagaccgggtaccgtgcccaagcacacacgggcacacgcccctcccacctccgggccatgtcctgccagagtccaccctcctgggcacagggcaagctcagctctcagctctccctgcctggctggcagcagctgcagcaggtcacaccagcagcttgggctcccaagagcctcgggaccccagaaccacaggtggcctggcctctggggatggtcgggggctgagcgtgagaccccagctgggtggcagaggctccagtactgaggattccaggctgtggtagcactccactgcaggccgacctgcaggccaggaggaaggggcccgccgcccagggtgtctgttctaaggagcgcagggacagggcctcccctgcaggcgaggccacagagtgggccacctcctcctccctgacccctcctcccaaggggcttatcctcctctgcagggctggtgttactcccccaaagccatcacccccctgtgtcacctcctcccgtggccacttggagaagtggtcattgtggtcactccccactgtggtcacctccccccaggtgacctccccaccaggtcaattccccaccaggtcaccaccctactatggcctcctcccccagaagtcacttcctcctgtggccagctccccactgtggtcatctgcccccacataacctgacactgtcaggtcatctccccgctgtgatcacctcccccagaagccaccccttcccgtggtcacctcccaccagggtgtctccccccaggtcacctccccaccaggtcacctcctcctgtggccaggtccctgttgtggtcatctgccccaggtatctcctcatcaggtcatcctcccctgtggtcacctcccccagaggccacctctccctgtggtcacctccctcccaggtcacctttcccccaggtcacctctaccccacactcatgctgaccaacatgaggtgcccttctcctgccgggagcccgcccggtcaccaacactccccctggggctctctggctcctgacctggagtcactagggccaaccccatcagacatgctggacaactttatgtgggtcacttaatgcctctgaacctcagcttcctcttctgcacgatggagacaaaaacatttgctcttcaagcctgtggtagggaccaggtcagagtaaacaggaagacagctttcggccaggcggtgcacctcggtgccggtgagtgtgagcgtgtgtgcgtgtgcacgtgtgcagatgtgtgtggacgctcccttctccgcagcagctcctgaccccctgcaggtgaccctcagccagccccagggctgcccccactctcccctgtggacacctacctcatttggggtgaagtggggggactggggtgtgaggggtgctttggggggcacacttcgacccctctctctgcaggccaagtcctgaggctcagtttcctcctctgtgccccggcgacgtggtgcaggcctcgcgagtgacgtgagggttcatgacccaggtgtgggcagccagcccttcacgggaggccacccacctggccacagtgcctgggaatttaggtcgggcactgccgatatgtcgccttccacaaggcgggcccgggcctctgctgaccgtgcaccggtcctggggctgggtaattctgcagcagcagcgcagcccatgccggggaatttgcgggcagaggagacagtgaggcccgcgttctgtgcgggaactcccgagctcacagagcccaagaccacacggctgcatctgcttggctgactgggccaggcccacgcgtagtaacccggacgtctctctctcacagtccccttgcgtctggccagggagctgccaggctgcaccccgcggtggggatcgggagaggggcagtgtcgcccatccccggaaggctgagcctggtgcagccagggagtgagggggcgggaagccggggtgctgccctgagggtgccccgacacgctctcctggggccctgagcggctgccacgtgcgtccagggttctggccacagggtgggcaggggccctgtgctcctcactggaggcccctgaggctctggaactgagaccatccacccgccggccccctctcgccggctccggcacccctgcctactgtgacttcctgccccggactcgctctgccagcttggggcaaaccacttccctctggggttttcacttccctctttcccaagtggggaaagaccacctgtccccgacccagaaagggcccctgcccgagggcagcagcagtgccaggctggcatgtgaggcttggggcaggcccggcccccagaggcacagggcgatgctctgtgggacgctgtgtcgtttctaagtacaaggtcaggagaggagccccctgaccccggaggggaggagaggcagggcaggaaaccgccaccatctcagcccacaggcctggctgctgggagttgctgacagcccgctcctccggggcccccaggcccaaggccaccctggggtgtagctgtccgctaggccctctgtgctcccggtcaacagacccacagggcctgcttggcggaaggggaggggtgttaagaatcagcccccacagaaagcattgccaggggattttgtaccaaaccgaatgcacgggtggacgggcagggcctgtggatgcgtaggccagagggagcggagcgatgacagggagcccccggggtgggcacggagcacagtcctttccctcccagcaggcacctcccacagcctccccacctgccctccgccatcccaggtcgccccgacccatctgctggggtcctcacccgcagcccatgagtctggccgccaggacgagtgcctatcagcagcctagaccctgaccgctggaaggttgggttctgtggcccaggagcagtacctggcgtgccaggaatgagcccctctcaccacagcctcacacccagccccagtcacaccactggggaccgggctggccccggacacaggcccaccagttcctccacccctgattaggcccttctgtggttggggtggggtaagccctgccctgccttgccccagaggccttccacctccattcctgccctccctggcctgccctgagtggccaactccccacgaggtttgccccctgctgaaaccctccccatgcccggctggcaccgctgtcccatccagcaggagcagcccctcccagccagagcctgccctcacagtggcttccctcgccgtgtccagggcaaggcgcccctcccacccccagcagccctgcgaggctaaggtcccagaagcctgggggagacccaggagccatttcccaggacgtagcgggggcttccgggcagcctgaggaggagggaaacggagcttgtgtgggttcagcaggaacaggcagcccgtgtccccccttgggtccagccttctgagagtcccgcctgccaaggccctcacctcccagggaaagcacttcacttcagtgcagctccttgctgcgacagccaagagcccccagaacagctccgaggaggtcgcaggacataagaagccccaaggttgtttctgggggccatgggggaggagagccctggggcaccccacaaagaggaggaggcagaagtgggcagggaaggggaggctgtggagtcgcggatcccacccgcaagcaagggctctgcgcgctgttttctgtgtctctccatctgcctctgtctaccccaacagggaggatgtgtttatttaaagatgccgctactcacagcagaagtgtctgtttcaaagcagaaatatgatcctgtttgggttggaggagggagtcattccatgaggaaaatatttcttctttacaaaaagagggccctggagcgtggagagggcaggagggcggacaccacggggcagctgagaactggaagcggggattctgggctctggggctaggaccccggcccaggctcttccctgatagccctggtgactcaacgcgtgggtcttttgtccttcacggataggaaccggcgtgtttgggcttcttagtttcctgtggctgccgaaattcattccatcacaattctggaggccagaagttcaaaatcaacatgtgggcagagccacgcaccctccatgggttctagcggaagatccttccctgcctcgtccatctcttccagctcctggtggcccttggcttgtggctgtgccactccagtctccgtcttcacgtccgtccccctcgtgcccgtgactctgggtcccaatttcccctcctgtcaggtgtctctgtgacaggacccctgtcacacagggattaggcccaccttgctcaagtatgacctcatcttaacttgatgacttctgcacagactctattttcaaatgagatcacggcaggtgccagcgcttaggacctggacataccatcttgggggcacaattcaacccataataccctccttcttaaaaagaaagtgaaagtggaggccgaccttgaaacgccaaggccttcctcctgcgggggcggggtgggagaggggcctggccacccgctgagccccgctctcaggcagcatctctggtggtaggaggggccctggggggcagcacaggcaacaaaacccaggatgccctagaggcccgtcactgcccagggggctctgaggtccggctgcagcatcagggtctgacccgctcggacatttaccgcctctgtgatctggactgaaggcttcaacctttagttctccctctgtgaagtgcgctgacagagaggccttggtgaggtcaccgggacagcttgcccgtgcccagcgagggaaggaggaagatggggccggccactccgctcagctgcaggacgacacccttatgtacttcccagctaacctgagacctcagtttccccatctgcacccctgtgaggacaaaatctctgctttgctccccaccttacccacgcatgaggcctcaccctttgacacagcaagatgagccccaggaacgggaggtgggagaaggcagcctagccagcctctacatccagaggcccacacccccagccttgcgtctggggaacgtcccagagtccaaccatctcccatctgaggggcttggggtcctgcagctgcagacgactgcaccctcagggccgacacccaccctggacgggcagacatgcacccctgcttacgccaactgctctgtctgggtgccaggcagggacaattcagccctatcacgggagcactgccgggggctcccacccacctctggtcctccggccacgtgtgcctcagtttcctgacccataaagcagggaggctgcgatgacaacctcaggggggaacatccccaggggcctgggcacagtggcgttcaggacataaaccactgtggccaaagcctctgggacaggcctctgagcatatgcaatcaggagagtggggagaagccagtcgctgggtccaggaagcagaagggagggtgctgagggcacctgctgtgggtgcttccttggggtagaaacgagaccagaagcccctagggatgagagcctggccacggcagggaccctggaatacagatggatcccacatgcagagcgcgtccccgggagaccccagacctggacggtcagcaaggcctggggtgagaaacagctcggtcccaggtaggaggggtgcccagagccaccacaggctctgtgacgggagggccaggcagccatcaccgcccactgggctgagcctgccctgcacttccagctcctgctcccggaaactgcccggtgtgggggccagagggtgaccccacagcactgtggcccagaacacgcgaaggcaagcttcacccgactcggaccactgctaccgaccgtggccagcccacatcactggagcccgggctctttcccccgactgggggcattgccggggtgtgtgctggggtgcgcccccgtcccccacaggacctggccgtccactccactcaccaagggcagctccagccaccccctgcaagctctgctggaccctcccgctccctcacccattgctgtaaccttcccgccatccttggtgccaaccctacacctgggagccacaaacgcctcttggatcccaagcctccaggcagggtggttctgagcggggtagcatctcccaagccctggccagccccgaaccccctgcaccaccccagcagggcccggggagctgtggtgctctgaattctgagtggccgatggcgcatcatgccggtgagaggtaataatcactgcctgactcagacacgcagactgctgggctgtcatgcctatttcaggaaaattaattataccccatgccgagagggaactcgcccatttaacgtcttcaacgcacctgcccagaatgccatggcacagcctgcctgcacccctgggcatgggaaagggtgggcagagcccccagtttctccaggtgtcaggcgggcttgcagggtggtggccagcagggctccaggcccttctagccaggcccgaccccgtcaccactgatactggaaactgcaacctttgcccagggagtcccctttgaaagccaagcctttgatccagctgagtgccagaaaaggccttgggccggccctggggctggcccgaggacctggctcagggacctggctggccctactgtggcattagaaagctccgcaccagtaagccgaccgttgcccacatgggaaggctgccctatgccctctggacagctggccctgctggcaagcccgtttccttctcctacttgctctatggggcctgctaagatggacagcaggcacgtccaggaccaggggctgggagctgggcttagctgccctgggctgaaattcagcccaggcctctgggccccgagctttacctttccctggcaagagttgatgtacacgttggcgtaaccaggctgcacacatcccaggacaagcttcccaactgtgactagccatggctcacgtttgcctgggttcccccaccaggctcgccccaggcctgcccttgctatgtcctcagacacccgggggcaggcacagctgtcaccctcctggcagctggaaaagaagggcttgagcagttctacagctcagcgaggctgcagggctttgcagggaagagccgccaggtgccagacgtcacgcgtggcaaggcaaatcctacagccggaactggctggctccggtgcaggcttgggacttgtaggcacacagatccaccccgtcctagagaagctgtcattgccacatctaccaattgaggctgttgcatttgttagtagttttcaaatgtgttttgtcattgttatcataaaaataaattttataagaacaccattccaccaaacacagtaagagtgatggtttcaggcaagcccacagcctccctaatgcttgctgtggcccggcgtctaccatctgaccacgaagacgtggacagaggcgtgtgcaccccatccccttcccacgtagagatacaatgggtaattaatgcacagttgacccaggagatgacatgaaaagaggacattcccaggaacaaagaggagaccagacaaaccaactggacacagagcaagaaacacaggcatgtcattcactacactcaatactacatgggcttcagcaacctacgtgtggataaagaaactgtggtgtgtgtatatatatatatatatatatatatatgatggaatactactcagacataagaagtaatgaagtaatggcatttgcagcaacttggatgagatcggaggctattattctaagtgaagtaactcaggaatggaaaaccaaacatcgtatgttctcacttataagtgggagctaagctatgaggatgcaaaggcataagaatgacacaatggactttggggactcagggggaaagggcgggaagggggtgatggataaaaaactacaaatcgggtgcagtgtgcactgcttgggtgatggctgcaccaaaatctcacaaatcaccactaaagaacttcctcacgtaaccaaataccacctgttcccccacaacctatggaaataaaaacgtttaaaaaaaggctgttaaatgggctaaactcaccaatgaaaagcagagatggttggactggctaaaaatcaaagacttaaagtatgctgtctgcaagaatcacacctgaaagacaaagacagactgcaaatatagaaatggtcaaagatacagcattcaaaccctgaccccggggcggctggcacggccacgaacatcgcaggcaacatagactccagggcaaggaagatggacgaagacacgtggagacagttcatcagtgaagaaagggtcagcctgttaaggagacccacagtcctaaatatgcacgcacgtgatggaaagcttcaaaatatgcagctggaaatgagagcagtgaagacacagatgaaggcacgagcttcgtccgccacctcacgctcttcccccagcaatgaacagagaaagaagacaggtcagtggaatgtagacagctccaaaaacagcatctccagctcgctcggatgtctggaggcttcccgaccgcagcagaatacgcgcttttctcagggcacatggtgtagacccaagcagtcagctgtaaattaaaaattaacaactaaaagttacctaaaaatggctaagtattaaataattagaaatggaacacatttctaagtgacccacaggtaaagaaggaaattacaagaaaaacagaaaacattttgctttttttttttgagacggagccttggtctgtcgcccaagctggagtgcagtggtgcaatctcggctcactgcaacctccgcttcccgggttcaagcgattctcctgcctcagcctcccaagtagctgggattacaggcgtccaccaccacagccggctaacttctgtatttttagtagagacggggtttcaccatgttggccaggctggtctcgaactcctgacctcaggtgatccacctgcctcagcctcccaaagtgctgggattaaaggcatgagccaccgtgcccagcctaaaaacagaaaacattttgaactaaatgaaaataaaaacacaacacaccaaaacatacaggatgtaactaaaggcgtgcttattgagaaatcagagctttaaatgtttatatcagaaacaagatataaaatcaatgatttgatcttttaaaaagctaaagaagagaaaattcaaatcaaattaagtagaaaagggtgataatacagagaggaaatcaactacatagaaaatgaataagcaataaagcgaatccatggaacccaagggtggatcttggaaaattaaaacaaattgataaacttccaatcaaaaagataaaagagagtaaatacaaacctttaatatcagaaatgaaatggaagacattagcacagattcgacacaacagaaaggtaataaaggaatattgtggaccaggtgtggtggctcatgcctgtaatcctaacactttgggaggctgaggtgggcagatcacctgaggtcaggggatcgtgaacagcctggacaatatggtgaaaccccgtctctaagaatacaaaaattagctgggtgtgttggcagccacctgtaatcccagctactctggaggctgaggcaggaaaaccgcttgaacctgggaggtggagtttgcagtgagccgagagcgccccactgcactctagctcgtgcgacagagcaagcaagactccatctcaaaaaaaaaagagagagagagagagaatattgtggactttacaccaacagacctgacaacccggaggacaggagcatgtgccgtgacagacgcgaactttcaaactcactcgaaaacgaaatcccagatctgaatggttctcaacctactaaagaaactgaatttgggattcaaaaccttctgattaagaaactaggcccacatgccttccgtgatttaaagaagcatttagggactcaaacattcaaggaacaaataataacaattctacacaagtagacagtcaatacaaggtgcagaaattgacaagctgattctaaaatgtatacagaaatgtaaaagacctaaaaaagcaaaaataatttagagaaagaacaaaattagatgatttccactacctggtttcattaagatttaagctatgaggataataataatcaagacacgtgctgtgctggccaggtgcggtggctcacgcctgtaatcccagcactttgggaggccgaggtgggcggatcacaaggtcaggagatggagaccatcctggctaacacggtgaaaccccgtctctactaaaaatacaaaaaattagccgggcgtggtggcgggcgcctgtagtcccagctactcgggcggctgaggcagaagaatgtcatgaacccggcaggcggagcttgcagtgagccaagatcgtgccactgcattctagcctggggaacagagcaagactccatctcaaaaaaaaaaaaaaaaaaaaaaaaagacatgtgctgtgccacagaacagatagatccgcggaacacagcagagcccagaagcagactctcgagttgatggttacttgatttctcacaaatgtgtcatattaattcaatgggcaaagcggagtctttcagtaaacggcgctggaacaactggttatccacagaaaaaaataaaaataaacctcaactgctatcccgaaccagaggcaaaaatcaactcaaagtggacagagctgtagacacgaaggctgaaagcataaacccactggaagggcacacaggagagcccccaacactggggtagacagagctttcttggataagacacaaaaagcaccagctgcagaagattaaatgatcagctggacttcataacaataaaaaccttcaactcttcactcttcaaatgaaaggcaagccacaagggagagaaatattctgtgtgtggcaggaggagagggtacagacacatacactcatgtgacaaagggacttgggttcagaatataaggtcagaatataaggaactccaacaactcaataataagaattcaaacaacccaataaaaattagcaaaggtggggcacgggggctcatgcctataatcctagcactttgggaggctggaggatcactttagcccaggagttcaagaccagcctgggcaacatcgtgaaaccccttctctaccaaaaataatatacaaaaattagccaggcgcggtggcgcatgtctgtacttccagctactcaggaggctgaaatgggaggattgattgagcccaagagacagaggctgcagtgaaccaagatggcaccactgcattccagcctgggtgacggagcgagaccctgtctcaaaaaacaaaaacaaaaaccagcaaagatgcaaataaatatgaaaaatagaatggctaattacaagacagtcaacatcaccagtcatcaggaaaatgcaagataaaatcatgataagacaccacgacagactatccaagtggctaaaatttaaaacactaacaacgctaagtgttggtgagggttggagcaaccggagctctcgtacgtggtgggcaggaacgcaaataggagcagccccgttggagagcagctgggcggcttctgtcgagtgaatcgctctcatgccacacgagccagcctctgcaccttggcctacattacccaatagaaatgagacacgtccacaccaggattcacagcagcatcatttataatcgccccatgccgggaaccacccaaacgttcatcaccaggtgagtgggtaaacaaacggtggccttccccaccacggaacacgactcagcaggaaacaggaatgagctcctgatgcgcggcacgtggaggaagccacgtttaattatgctgagtgagagaagccagcccatcaggagcacacgctgtctgattccattcctaggaattctggaaaatgcaaacgcatgcccagtgacaggaagcaggtcatccgttgcctggggccgggaacacggcaagggcacggagcggagagcccaggggagctttctgggtgacaggcgtgttctgtgcgtcaattctgatggtggtgacccaggtcggtgcccggcagaactccttgaagttcgcaccaaagacgacgcatttggttcaggtcactgggagctcggtggagctgatttgttctggggcacatttctgctgagacggatttgcgttctcccctgagcctcacagtcttccggccccccgctctggaacccagggccccgggctttccacttaacctcttggctggaagggaacatgctctgtgatcataggaaggtaccttccccttcaaatttcaaagaaaagcccctaaaatctgctggggaagcccattcattccagaccagaacactgcaaaggacaaaaggggaatggagcatttctggccacctgggttccctgagtactttttctaagtcctttcttgtttcttgtttctttctttctttcttttttttttttaacagaaatcacattcaaataagtgaaataataataattagaaaaaagtgagtcagactgagaccccagcagttcccctgaggaaagaaactgaacattccctacctcctccctccctccctcctatctccctcctccctccctcgtctccctcctccttccctcctctctccttccctccctcttctctccctctctccctcctctctctccttccctccctcctctctcctccctcctctctctcctctcttctctccctcctctctcctccctccctcctctttctcctctcttctctccctccctccctctctgcctccctctcttctccctctctgcctccctcctctctctctcctttcctcttctgtcctcccctctcccctccctctccccctctctcttctctgccaggcgccacaccagctgcacaggcaggacccggagcccagccctcctggtctctgaagagccagacctggacaccttcctcaggacccgcccgcctccgaacagcagactcctcccaagatcagaggtggggccacaggcagggcggctgtgctcacccaagccctcaccagcatgccgcctcaacaccccggtgttattccggaagaaacacgaagaggccaactctgtttcttccaccccaagagagtcggttcctcttaggtcagattcagttcctgcctccgagggaggcgagcacgtgcagaaacaggtggatcttgcctcggctccctccaggctgggcccagggacctccctctggctggggcatcccctctctccccacccccaccccgagaggccagtcctgctcctgggagccagtatttctggactgccggaaagccttcttcttatcccgcggcccagcgaggagagcgccagccgttcagggtgacagaaaagcacagaggcagggcccaggcgcctccaggcgaaggcctccgctcccaccgctgcgagaggaggcgcgtccacgacggaataagcaggcggtcaggtcgccaacaatccggtcaaccacggtgcttcttccctggtgggtgtctggccccgttcttgctggggatggcgctcggggatgccaccgtgtttccccagggcccactgtgcaccctgcatgtcgcgcccttgtcacgggagcggcctgctgacccggagcacgcgtggccgtcacaaagggctgcaaagctgcagcaccagaacgcaaactcaggcgtgcggcaacggaggccacgttctcagccaccgtgccactctgcatgtcagctggctgggcgtgcctccgtcttgtgttagcaaggacatggcaatcacctgatttgctttggttgaagctccaggcagtacctggcccctcaccagactgaaaaagaaagtcccagaaccccagaaccccgtatggctcagaagtgccatcgagtactaggggtgcgccagggcccggctcagcccggccaagccccagcaggaaggaacatgtcctcaacgagaacatcctgcaaaatgcccggggtgggtgggggatgctcacggtgccagacgtgggctaggggccataaaggaccctcaggcaaggggcaaacacacccatgggtgtggccagctccctctacccatcaggacctccccagtggagggactgaaatgactcaggagcagatcaaggggcccagggcagaattctggagtcctacaaggcctgtgggaggctccccaaggggggctccaactttcaacctgagaagtctaagcctctatcaccatcatcatcgccatcgtcttcgccaccatcaggagttctggaagaagcgcccaagcatgggagacacagggatggttttgccagtgctgtgtgttaaggagctgctacctgctggggctgcttcagtaccctggagcaccatgagacacatctgtccccacgaggagctgaccactaggtcggggagctgagacatgggcaggtcacaccctgaattcgcatgcacgacacgacaagaggttccgactcgaggttcctggtttctaaggctcccaaacaataaacacaggtgccctcagcacagccgcccggctccttgttcagcagatgccacacagcccaaccttggtgtcctgaggcggccccactctaagcggggtggagcgacgaggctgcctggagacagagcagctccgtgggcccccagctcccctgccagattcccccacacaggcatggcccaagcaggcacctccgctcactcaggagtgctcagccctggtttggcctccctgtcagacagcctcaagccactaagccagcggcagccacagccaggacctcggaggctactgctttgttcttagagacagcaaaaccgcagagatgactcagaagacaaagagccccctccccggcctctcccaccatccagctgcctgaggggccgtcgcagtgcaggctctcccgagggccaggacgccctgtctgagcagggctccaggaacaatgaggctggccccggccacacttatgcccagccaacctcagcaccgacagtggcctgccctgtgcctgcccctgcccatggctcctgcctgctctcctcatgggaactgctgcgcactcactgagcatctgcctccttgagaaaaaactttgttttcttcttaaaaacattgtggtcccggcgcagtggctcacgcttgtaatctccacactttggggggctgaggtgggcggacctcaagtgtgaggtcagaagttcgagaccagtttggccaacatggtgaaaccccatctctactaaaaatacagaaattagcccggcatggtggtgggggcctctaatcccagctactcaggaggctgaggcaggagaatcgcttgaacccaggagaaggaggttgccgtgagccaagatcacgccactgcactccagcctgggtgacaaagcaaggctcgaaaaaaaaaaaaaaagtagtaaaataaacgtaacatacaatgtatcgttttaaccatttttcggtacacagttgagtgcgttaagaacgttcatactgttttgcagccatcgccaccgcccaactccagcacttttcatcctcttaaactgcaattcccacccattcatctctggctcagcagcccctccccagcccccggcaccccccactcccccttctgtctctgtgaatctgtcccctctagggccctcgagtgtgtgttcttttatgacgggcttgttccactgagcacggcatcctcagggtccatcctcgctggcagccatgctgggctttccttttgtacggctgaggcctattccactgtcggcatggactacatcttctttgtttgtttttttgagacagagtttcgctcttgttgcccaggctggagtgcaatggcacaatctcggctcaccacaaactccgcctcctgggttcaaacgattctcctgcctcagcccccccgagtagctgggattacaagcatgcaccaccatgccccgctaattttgtatttttagtagagatgaggtttctccatgttagtcaggctggtctcgaactcccaacctcaggtgatccgcccacctcagcctcccaaagtgctgggattataggcgggaccacatcttcttgatcccttcatcggctgacggcccctcgggctgcttcctagtatggctgtcgtcatgctgctgtgaacatgggtgtacaaacctctctgggccctgccttcagttcttcagggtccataccattaggaggagcggccggatcaggtggtggttctaatctttgaggagctggtacactgctctcccataaaggctgcgccatttgaccctcccaccaacagcgcacaaggggtccattttggtaaggaccaccttaatgggagcgaagaggttgaagagctttttttaaccaaaatatccaccaggtgacaacatgaacaagtcctttgttctcataaagcagcagtgtgtgccctcttgctagaaggtggtgaagtctttcagagaccaggaaatggtttggctgtgagattcttccaactgcttaatttataaccagactcagagaacctggcggaggatggggtaaggatggatggtgccggcagccccgggcggtgctgagactttcagtgactgagcccggccactggggaagggtcctgaggagggggcagaccacggggccacctgtggctgccgcagggggaggggtcctctgcagacggaaggccattagttccctgcagtgaggtggaatgcaggagttggctccctgccctcctctttaagatttgaaacttctacaagcctggaggatgtggcctctcagggaagccgcttggaaggaaagagctcccagagagatgagagagagaggaagggaaaaagtcaaggttttttccttccaaatattttatttaaatattaaattaaaaaacatacatcaactaatcatttggcatacatttctcatgttaacataagagataaaataattcagttatggtaaaaaaaaaaactatgtacatctcaatcagatcacgtagtgtctttaaataggctattgcattgccgtctgtattacagcactgtcaagaaatctacaaaacacacatcacacactcttaaaaaaacaagtaaaacacgcctttaacgtcctccaaaagaggttccacagcaataagaaaaaacaaaaaccaccgtgaaagtaaagtgcttgtcattgcttcaaagaggaaacacacaatggtttctgaggcctttgatctatggcattagaacagaaatcattttaaaaaggggaaggggttttgtgttggaatcagttgtgctacctctgtaaaaatgaaggcaagggcctggctgccccaagatggtctggattctctcccatcccaaaaacttctttatgagcgaacaggagactttggtgttttctctgcggcaaggcacctggtctgccctccggacagcctttcgcccagtctttgaaacagccacagagcagcagcagcagcagcagcaggaatgggggcagccagcttccctgcggcccggcacaggcacagcccccggtgggcaccagcaggccagggatgcagcctcctgcactgggcccgcctccctaccctcaagtaactgggtcaatctttggcttttaaaaatacccgcctttcccctttctcaatgcctctgtttaacactgcagggtttaagaagccgaagtagctgaaggcacctgggctgggtttgggggcggggactggactcagggagcagcattgccttcgttgccttccagaggcttctggctggtggagccccacggagtccacctgctaaaggtgcgcccagacctgccaggtaagggccgccccttcctgccgcctccaccccagtgctgagggagcgaaggccctggggccccttcctcaatgcacacctgtgctgacagggacgcttcttaacaacaggagcgagggaagctgaaacctggaacacaaacgtatagtacaaaatgtaacaaataagtagtgtctacctgtctcccatgtagatacatatacaggatttgctttaaaaaaaaaacaaaaacttaaaaacactgacctaaacctctcactttaccttccttgaacaaaacccaaaaagcctaggtggggggtggggaggggggtcccggcccagggcaggcaccgccctgagccatgagccatgagccatgagcctgtctcccagctgcccagccctacagtcagcctccaatattgcacaacttcacccaagtcaggtgttcttgttggaccccatcatgaaatgcataaacgtcagcagcagcggaaacgggaggtgcagcaggaagaagcttctgggcttccgcaagggcacgcaggggctcagggccaagtgaccctcaggacggagtccccagcactttgaagtcacctctgccctctctgaggttcttcctgccgttcctccgcagagtcctggaaaactaatccttgagcagtttatgaaacttctcaactaaaataagaaaaaaaagtcttccaggttttgatttcaggggagagaattcctagaatctgtagatgatctttgcctgggctgctttaaaactgatacatgaagcagaaagttcacagttttccttaaagcagaaatcaggaagtggagagcgttgactaaagaaatggatagtaatcaatgcacgcgcacacacacacacacacacacacacacaagcggacaacaatgcgcccgctcgtttccgtagacgtccgaggtaatcatctcaaccacgacgaacccagagagaggggccgagatccccacaccacggcactgcacgtgttccctccaccccgctcccctcctgcccccgcccccagacacgcccctcaattatctttcttcctaaagtttccagtccctactcaaagttgaggtcactcagtgcaagaaaaaaataaaacaaaaataaactaaaaagccaaaacacctaacgtattgcttatttcgcttctagaaagttcttggctttgaggccagatgtcttcacctcctctgaagttattgctgtaagagtcagtgtccgtgccaggatgcagggctgccctcactgcaccaggacaaacgtgcctagggagcagggcatcaggtcctccatctcacagtccccctgcagcagccccaggggctcacaacctggggccagcctggccaggcgtggtgggggcacagcggggagggcggtggggccggtgccaatgtgcaggtgtgtgtccaggagctgcgccgctgaggccaccggggacgcgccggtctgcaggagtgggggcggcagcagcgggagccccgacgtgaggagggtgctggggagcggggcagccccagggccatcacagggggcgatcacaaacggggcaggggccggctggggggcctgggagcagccgggtgcagcggccgggtggtgctgtaactggagcagcctgtgggaacagaggacaggtggtcactgcgccggctcgcagggttctcgggtttccgagtgcccgtgtggcagggcccgcccgaggagctgccagccgcggctgccgagggcaggtgcgtggctgatccctgaccgcgccccacctttcattctccacccggtttctcagcagctcagagatgcggccacaaggcgccctcgctccccgccaccctcacccacccagggactttaaaggacacgcccgcctgctgcacccccatggctcagcacctaggacctacgccccacacatctccctggctgggagcgggggtgtgcactgggctacagagaggagggaaccacttagcagatgaggttcctcgaggagataacctgccgtgtgcccacccggggtcccagggcgggggcaggccctacctctgctgctctagcacctcctccagcaggctccagccctcccggctgccggctgcgccgccgtgcaggcctgggctctgtgcaggggcgtggaaggggctcaggccgcccctgctggcccggctggcgggggcctggcacacctggcgagccagccccttgattttgttcagtcccagaaaccctttggtccgcgtggtcttcctcagctgctgccgaaaggccttcagccctgcagggagaatgaatcaggaggtcaacggccacccggctctcagcccagcatccacggcccttggcttaaggggtttccaagcctcaggttgggggtaaggaaaggacgggtgacacaagcacgtctggacaggagtctggcacctaagccccaggatggcgtggaggcagccggcagccaggggccctccctcctccaagtcgggaggtgctgcccagcacagagtcgtctcctgtgctttcagaaccagccatggaggccgcgtgctcagggacccatgtgtgtctatcccagcaggccgtgacgccccgagccaccagagcactgagcaccccagcctgcccagagcactgagggtcccacccaggcccggtggagaacagggggtgccatctgccatcacggacaaagtcacgtactgccagagacacacatggtcccctggggaaggtggaggtaagtgtgggaggagcgtggctcaccttgagtcagtgaggtgtccgacgcccgccgtccctcctggaagctgacagggagcagaacagctcctcccaagcccccctgagcctgcagcactggggtggcggactgcgaccccaggaagggcgaggccagcctgaccggggagcaggcgcccagcagcccctgagtggccggggtgccactgagccccgcggggcttttgctcgcagagaaggtcagacaactgtcagagctggttccctctgcaggacttgccgtggtggagggggagacgactatacctgtggggggaggacagcgcttttgatgctgcagtgcaaaggaataggctcccccggccactgctgggcacacatggctgcgctggcctccccatccccaccatcaacctggtgggaagagggctcgaggccaccagagcccagggagccacaaaggcaagccaccatcacggtgcagctgcagggggcaggtcatagtgggcctcaggccaaggggctgccctcccggcacccaggggcggcctggggaggaccctgctggaggccagaccccatgctgtatcctccactggaacgaccacatgcagggcaggctctaaacatcaactgtgtggtctcagggattaaaacaaatggcaaatcctgagaagtccaacctgagaggctgccgggcaaaacgtccattctaaattagcccaccctcacgtcgaccgtaagcctatccaccggtgtcctcctgggcccccggggacacttacatggcgcggtgagtggggagaggcgggtggagacctcggccagggtgtgcctccggcccgtgctgctgggcagggactcctgcgtgtcctgctcctcctctaggcccggcccctgcctggcctcctcactgatggctgtgtccagcaggctgcttggggacacgggccggggccggaacactccgctgcagctggcatccaccgggaagaacaagggctgcgttggagagacacaagccagtgacttctcggactccaggtgacccgggcacaccgggggcaccagggctgggctgaggcgagccctctgcacacccgctgtgggcactcacccactgcagcgagctctggagctcacagtccatctcggcctggaggacggactgcaccaaggtctgcggctgcgggcacagcaaggcaggtcggaaagggtcggtggaaagaccttcctgaggcacctggggccggcagacgggaaagacgctgtcaggggagcgactccggaccaccagcgccatcaagagaagaaacaagctggcttctgtctggagtgcaagctgcctcgctggtgggcatgacagctgacggagggacactggctggccaggctgggctcaggaccaggtgctggtgctgcgctgccagaaggtggcgtgacaggccggccccagggatgagtcagggacaagtggcctctgggcagagtccagcccccagcagctggcacccccttccccacgaggcctgggacccactgcccacgcaaggaaccgccctccaagccggtgcctgacaggggagggagcctggggcctgggaggagactcctccccctcacctccaaaccactgaggtccgagctccgaggccgcggctgcctggcaggcccggggcgggcgcactgggcattccgatactccttgagccgctcaaggaggaggtaataaatggcagcaaagtggttatagctgctgttttgcagtgactgggaacaagaggagcagagatcagcatggggatggcggggagccccagggcccacccgatcccaggttattcttgggtgactgagaatatcctttagtggggtggacaagccggcccctaaattagcctgtgctcccgttttaactcagctggtgagtgcctgcttcccctgagacagctgcctagcccctgcgggtgaggccagggcaagtgtggccaggctcacctccaccgtcctctgccggtccacgcccagggtctgcatgatacccagcgcctgctcatcgtagtcgcccaggttggaggtgtagctgtgtgcggagaaggcggggcaggcgggtcccggcaagcagggctcagcccgcatccaccggtgctgccggatctgggcgatggtgatgcgcctggcggggtccaccaccagcatgcggcggatcaggctctcacagtctgtggaggggccaggaggctgagccagggcggccgggacctcggctgcgctcccacccaccgccccacgtggtttgacacgccagggcccaggagcaggggccgggccatcggctcagtcctgccacccaaggggagccatcagccagggatccagaccctgggggctgccacactttgtgtccaccacacagagaaccacttaggttcacccttctgccgtgccccacacctgagcaccaggtggacaggcatctttatgacacagaaaagccgggtgagccacagccagtgggttggactcagggatgatgccagcaccctgggtgcgggtactgggcggggacggcaggcgcaaggcacaagcctgtgcagcaagggcacccgtccaccctcgaaatagggcactgagaaggcatccatgggctgggtttctcccgcagcccacagtaacctgggcctgattcccagactcaacaaggactcagaagccagccacgaaggggctgcaggagacacaggcccctgcccaggcgagaccacacgactcaccttgagacatgaagaaggggatgcggaagcggccctccagcacccgctgtctcagcgtcggcaggttaggcccatcgaaggggagagaaccgcagaccaggacgtacagcaccacgcccaggctctgttgaggaccacagagccacatcagcgccagggcggtgcccccgggaacacggcgccctcggggaacgcggcctcgggaagggggtctgcgcgcacagggctcctacccagatgtccagctgggggccttcatactccttcccctcaaagacttccggggcggcatacggggggctcccacaccacgtggacagaggctctcctgacttgtagaaattcccaaatccaaaatctgagcggcaaagaaacagatggatgaggttaaacggcaaatggcaaggggctgcggtttcggcacaggggctgtggtttcggcacatgccgggaagctggggctgcttgcgggcacactcccaccccggggcctccgtgcctgccagcttgatgtccctgctcccaccccggaccctccgtgcctgccagcttgatgtccctgctcccaccccagaccctccgtgcctgccagcttgatgtccctgctcccaccccggaccctccgtgcctgccagcttgatgtccatgttgccatccagcaggaggttctcggtcttgaggtcccggtggacgatgtgatggtcgtgacagtactccacggccgacaggatttgccagaacttcttccgcgcctcgttctcactcaggtgcccgttggaagtcaaataatctgaggagccacaaaacaaagctacagcccccagggcaaagcctgcccaccacccatggagccctggggaacaccgcggggtcctgggatgtgtggcccagacactggccgcgcaaatccagacgcgttcgtgccattggttttcaacagatactgaaaacgagtgtggcttaccaaacatttctccatttttagcaaattcagtgacgatgtaaagcatgtcctttgtttccataacctaaagaagaaagacctgacatttaaccgcacaaaaaaggcacaaggcagcgctacaaaccatccaccagaaccccaggaaatttctaacttctctaggacaaaggcattcatcatttaaaaatgcaaagaaaaagaaaaatttctcaaataaaaaaaaaataggagattcctactcacaaagacagctttgaaaaatcagaggtgaattcctcactgacttgcctatcctgatacacctttgctctcacaaaaggtctaaatatattagaattcccctctgtggtcatatttaattcaagacacctcacatacaatttgagaatgcttaggccggggcatggtggctcacgccctgtaatcccagcacttcgggaggccaaggcaggagaatcgcttgagttcgagaccagcctggtcaacacggcaagaccccatctctacaaaaaatacaaaaactagctaggtgaggtggtgggcacctgtaatcccagctactcaggaggctgaggcaagaggatcattcgaacccgcaaggcggaggttgcagtgagccgagatcgtaccactgcactccaacttgggcgacagagcgagactccatctcaaaaaaggagagacagtattctgaaggctacagaggaggagattgctggaagtctgctgggctttatagaagcctagtaggcaacagatgattccagccaacggtcagagccacctgggtaatagagaatgcacaccccattcccactcgcttgattgacaggatgaatgacgctgtgggaacccagctttattgacaggatgaatgaggctgtgagaatccagcctcattcactcagcatgtagccattcactcagcatgtagccacacaacagccatgccaacatagccctttgaagttcattcactaatcaataactttattttacttaaaaagagatttaaaaatataacttatgtctgtgagtattgaaaaattttggagaggatgaggcaatatattcttatgaaaaaagatttttttgggttcaaaatatagttattcctttaaaaagatgctttgtgctggaggtggtggctcatgcttgtaatcccagtactttgggatcacccaggctgatcacttgaggttaggagttcgagaccagcctggtcaacatggtgaaaccccatctctactaaaaatacaaaaattagccaggtgtggtggcgcgtgcctgtagtcccagctacttgggaggctgaggtaggagaatcgcttgaacccaggaggtggaggttgcagtgagtcacgatccatagcgccactgcactccagcctgggcgacagtgagactccatctcaaaaaaaaaaaaaaaaaaaaaagatgcttcaaagattgctgctttgagttataaatctaaaaagaaaagtgttctataaattctagcagtttggcaagaattttaactgccccgcccctgtgggtggtacaataactctaagaccactgctgacccgtccccaactgaagaaagggaggaggaggaaaagaattaaaagtcaaagtgtttgaactttttgaaaacttgaaaaaaagagggaagtgtctcagcagggttctggggccccggccagcggaatgaaaattagacactagtggccgggcgcggtggttcatgcctgtaatcccagcactttgggaggccgaggcgggcggatcacaaggtcaggagatccagactatcctggctaacacggtgaaaccctgtctctactaaaaatacaaaaaattagctgggtgttgtggcgggcgcctgtagtcccagctacttgggaggctgaggcagaagaattgcttgaacccaggaggcggcagttgcagtgagccgaaatcgcgccactgcactccagcctgggtgacggacagagactccgtctcaaaaaagaaaaaaaaaaaaaagacaggaagaaagaaagaaaagaaagaaaattagacattagcatcaaaaccagaggagtaaaagtcattgctacaccactgaattctatcatctcccaacagttaagaatcacatacagcagcagtaagaaaatgcacctccagaaaagacctcagcagcaaacacatgggcaatttgtttctttaacggagctaattccacacaatgggcaaaggagaagaacaggaagaaaaggaaggtactaccattagggttcagcccttgagcaaagtcaaaaacaaaaccagctcagcccactcctgaggaaatgggctgggcacgctgcacaggcagtacaccagtggccatggagcacacaacttaaaaatgacaacagaaacaaaacacaaaccaggcgcacacggcatgaattctgtgcttaaagacactgagcaaactgtcgtaagctccaccaatactgctacttttattttcaatctagtgcagaggcttttgggggataatttcgaatcataattctctctcctaccacactgtacaccgagctgtcctaattgcacaaacacacacaacaacatcccagagtcatctcacattccatttcataagaatcattacgaggaacttcaacccaacacaaatggatgaaatagcacctgcaaagaacttcttctgcaagaagacttgatttcaccttgcaaaagtggtcatttgtcattagggaggtgtaaatgattgctttgctgttctaattaaattagtacttatttcctgatgatataatttattaatttcaacatgagaacaaaaattaagtcacaaaataaaccaacagagagacagggcaagccatgttcctagcatggattaaatgacaagctccttgctcttactatggaaaagtattttcatctctccgtttttcatggaagagtttaaatagggaaaacaaatgctcactactgtccttgcaaaaataaactaatgaaaaccagtaagagcagctggctttaaagtttaataattatctgcaaaggcagaagtttccagtttcactcaaatttgtccttttatactaaatgcgtgacctgtggcaatacctacagataagtttgtctgttttcatagtaaagcaaatttacaacagacttctacacatttaaaactggatcaggttaggatactaaataaaattctaatgaagcaaatctcaattatgatccaaaagcaataaaataattgtaaatatatctgcacagcctataaaaatcaatctatttaccttatacaaccaaatgcccaacttccacacactccccaaaagggaagccaccttcagaaattgcagacttatgctgttggaaataaaatataacacatttgccaggattagcagagaaaggcaagctgaccccttacctggtaaagctttatgatgtgtggatggttcagaagcttcatcagctgaacctcacgatagattttctccaaattgcttgaatctaatcgtgttttatcaattatttttattgcaacctacaaatttaaaaagaaaaaggatattctgtgggtttttttaaaaaaagaaaagaaaccctcaacctaatttacacatttcattttttgcaagttaatttctcaacactctgtctccagaaggtcacaagaagttgggaaaacataaccaaagtaaccactaatgttatttaaaataatcagagttaagtaagtgacttaagtatttgcaggctcactttacagggtttagctctgagtccatgaaccactgcaatcttaggttggtccttttttttgctattatcctctctgctttctcccaatatatgtccaaattatgcagcaacataatataaagcattatttttctttaccgaactaaaaacggttactatttacccaccacgacaatcaagcctggagcagtgaatctgcatggggtccacccgccaaaggtcgggtcgccccgggtccagtggggaggccccgccggctgggtcccaccgcccccacgcacctgcgttttggtgactcgatgccgcgccagcttcaccaccgcgaagttgcctttgcccagggtccgctcgatgtcgtaaaaacccacccggaggggcttctgctggccctgaccctggcccgcggggtccgcgctgaactccgacatgataaccatggctccgcgcgcacctgcggggccgcacagagctcagagcccaccagcgcccccgccgcccgcggtcggctccatccgtgcccgcggagcccccagtccccacgggacgcagggacctgctcccacgcctgtcgcccccactctatccacgggcccctccagccccgtgggaggtgtggacccgcccccgccgcccgctccacccggacccccgaccctcttgagccccgcggggcgcacggacccgctctcatagaggcccctgccgcccgagtccggttccgtcccgatcccgggaccccctgagccgggattccacactcgcctcccgccgcccgctgtcggttccgtccccaccctcgacccctttagcacctctgggcgcggacccgctcccacacctggccctgccacccgaggtcggctcgatccggatcccaggaccgtcccctgccccgctcccacaccctgcccccgccgcccgcgatccgtccggtccccacccccgacatcccaggcacctcggggatcgcggacccgccccccacacccggtatctccgcccgcggtcggctccaacctgacccccggctccccagcccctgagccccgcggactcactcctaccccggccccccaacaaaggggagcccgagggcggccaggccgccaaccccgcccgcgaaccccgcgcgcgcaaggccagggaccctgcgcggtggctgcaaccccgagccccggcccggcgcccgcgcggagcccccacggcggccacctccgcccgcccggagcccgccgctgccgccgctgccgccgctgccgccgcctcacctccgccgccaccggagcgcccaggccaggaagccgcccgctcggccgctggcgctgctcgggtgcctactgctccggctgccgccgccgctgctgctgcctccggggccgcgccgcatgtcagcccggagccgccgcgctccgccgcacgcggcgcccggccccgccccggcccgccccggcccgccccccgtagtccccgccccctgccccgcccccgccgcccgggcgggggccgcccattgacgtcgctttgacgccagagcgacgcgcggccgagcgccgggcggagggagagcgggagatcgggcggttgccaagagactggcggctctgacgcgcgcgggatgaggccgttgccctggcgaccgcgggccggtgacgtcaggggcgcccgccgcccgaggcccgcccgcctgcgctccgccgggcgccccctcccgggcgctgggggcactgcgggcggccccaccgccgagggcgcgcccgcccctccacgctcgggcactcgggccgggtcccgcgggcgccttgtgctcgctccctccaggaggggacggctctcgggcaggggtcgccggcccctccacgcggcctgcgttcgtccagactcagagcctcgggacgtgcgggggcccgggggcctcgcgggctcgcgcgtggggctggcggcgcggatgccctggggcgctgcagaccccgagaggccgcttgcccgcggggacgtcagccgcttttgctgttaaaatctgaaatgttcagcaagttagaaacttgaaacctaaggaagcgtgaccggccgctctggaagcccccgccgcgcggccggtcccggccccggccctcagcggcgctggcgtctgcgcgtcccggggctgcccccgcagcatgtggggctgggaccctcttcccgcgcgggccccgggcggacgctgcgggcggtgacggagccaggccggccgcctgggtaggggacgggggcgcgggaccacttgcttgcccgtggccgatgcctcatccgaacggaaaacgttttcttcaggggagacagaggctgtgggcgaaggtattttttaagcctgaggacccatttgggagttagattctggatcgagcctagggtcagttttccttgtgttaaataacactacttcacagaagggggaacgagaattcaggggagttggcacaaaacttggaacccttctcgggaggctttcctgcctggacggacgcctgggaggagggcccggagaaacgaggatgagcttctcctcattcgcccgagggtctgaccacagatttcccaatcgccacacacacacacacacacacacacacacacacacacacacgggttgtttgggagtcagttggttttcaaaggctttcaaggaaatgaagagtcccaaagttttccttaatcgttcagagtgtttttctttgtcccaggtttatataccaagaatacgggggaatatttttagttcctttcagctgaacagtgtacaactgccttttttccttttggaggtcccaacaccctgttaatccgctcctaggagaactaaacaaaaacaaggctggacgtcgtgtctcccgcctgtaatcccagtgctttgggaggctgaggcaggaggatcagttgagctcaggagtttgagaccggcttggttaacatagcaagacctcacctctataaaatacttttaaaatagccaggtgtggtggcacacgcctgtggggccggctacttgggagcctgaggtgggaggatggcgtgagcctgggaggttgaggctgcagtgagctgtcattgcaccactgcactccagcctgagcaagagaacaaggccctgtctcaaaaaagaacaaagataaaaggcggggtgggggagaaaccaggcccctgatcacactcaccattcagtccctcagcctgtgacttgaaatactgccccccgcatccaggaagcaggcttccccacccctcccaccctagccagagtcttccaaaaggtcttaggtatttgcaaacacctggctggctgtttggaaacattgcatcagcaccaaataaaaactgcagccaaaactgcctccgcagaacaggtccccaaactcaggtgcacttgacctttcaccctgacccagccctgagcttccaaaacccagaacagccctgtgccaaccatggccatcctgttttcccttccctgggcccgtgggcaaggagctcgctctgcagagaaaggcaggaagcacagaggaaaaggccaagcttggaacggctgtcccgtctccccactgggggaacccctggcaccctcataactaagtctgtgcttcaacctggtctctgttacccaatgtcttttgttgttgtttgtgtccttgaccccccgaggctgtatttcctctcagaagctttgatttcttttctgttttctggtcttccgtgcctttaacacgaggaaaaataaaacacatggtgtgagtgtaaggatggtacaagcaaatgattggagaagctcctcactgaacataatggaaggaatgctcccaaagtctgcaggaacggtactttattattatggtttgcatattattacagatttgtggaaaacggcaagtcagttttcctttccacatggactttcttcagcttgtcttatgattgccgtgtttctggagttcatcttgttttttaggccttaagactggaaaccccaacaggaaatgggtccatttattattcatagttgtaacgctggccactggcatgtcacaaaactctcaaaatcaattgataaacacagagaatggagcgtggggcagcatttttgcaaagggatgggtgcccagctggccccagtgccgccctctgtgaggaaggaatctcccagtgcagccaggagtcagacgagttcctcttcccgaccctaccctcccatcttcgacgcctaaggcccttccctgtcttcctggctttgcttcaggtggttttgtactttttaaattttgttttggtttgtttaggcttcagcctagcggctttaggtgccagaaaatcagattaaccactgcagcggcatccttctcagggacccgggggccacgttggtcattttgccccattgtatctggagagcttgacagacagacatgtgtgcactaggtcaggaagccacggccctggcctgggaagagggcaggtaggagaaaagcccccagccccctccaccctcagggaatggcccagttgtccacaggttaagtcaagaatcccccgcgaacaggtcaaaccagagactgcccagtcccagcgtccgcccccagggcattgcttccttcacctcctacacttggctccctgtggttccgtggctgccacagttgtgtggatcctaccgggcccagggcccctccccatctcagacagcacccactttcaggctaggccttccacgggctgcttaaatggaccacgaaggccggcaaagcagcagaaacgtgcctgttcacgggccagtcggccctccccgctccagccctctagggtttctggttccggtttctgtcgctgccgttagtgaggaattattcatgtggccaatgcgttttcttgacatttaagcagggctgtggccgatatcaaggctgaggacccaagaggcctttgggtgtctgtgtccctgagccatatgctgaggtcggacggcgggggaggggggtgcaggaaggggccagccccagcgagagtcagccaggccccaaacagagccaggggttcccccgggggggagtgctcacttaggaagagcaccatggacagcctggcaggaggtcaccctgtgctgagcaggcagcgctggagtaaaccacctgcctctctgtaggaagaaggaaaccgcatccgcaaacggagcaaaggtccccagaggcagagcagaagcctctgggatgctgcagctttgtgcagacactggggaccaggactggagcaggtgctggccgtgctctttatcctgggcactctgccagggccacacggagcgtggctcccgggagatggagacgtctgagtgtcagctcaggtctcggtgtttccaggtgacatgctggctgctagtgtagagcatggtaaaccatcttttttttttttggttactatttacttatgcaaaataatgtgagtttctgccatttgcaacaagtgtgccagctgcaatgagtcagcgggtggacacaggtgagcatggccagactgtgccagaacatggtgacagacagacatgcttcgaagttcactgtgggaagggacaggtccccagagagaggtgagacggtgcaacgcgagggtgagttcggagtcatcctccagatgtccacaaaggctcgagaggccctgctgtgtgtcaggcactgcgtgaaggttgtgggcacagtaggagggacacaagacaccttctctcgaggaccgttggttccagttgcggagacagtaacagcataagatgatgagtaagaaaagaatgctggcaggaaagtggccatggagggaactgcttccgggcctctccgtgggatttgccaggcgtggactgagcgaggaccttccctgagaacaccaactgctccaggagagagaagaggtggagccccggcggggggcatggggcaggaggcagccacccacaccttccctctctgaatgctgagcagaggctctcagcagaggggaagaagagcagaggccacgattgggaagacagacccagtgggggtccttggcgccgtccacatccatctgcaacctgctgcccagcgcctgcctgcccggggtgtgcacagagcagtgtggtctgtcccggcttcacggcctgacacggccaggcgaggatgacagggaaagggaggcagggacttggggctgttggagccaagctgaggagcaaggagctgcgatgggaagcgggtggcaggaaggagcgtgaggcctgtgggtggaaggtctctggccttggagattgaagcgtttcacttgtgcatctcacagcccagagaagccaagcccggaccatgggggagagaggaggacccccgtctcagggcgggctgaggagacgctctctccacggcttccggatgggtctccctccatctcagctgcatctatgggaaaacgatgaaatgctccctccactgccgggccttctcttataaagcaggtttcttcgaagtataaaaattaatagaaaaggttccatagaaaatcaagaaagtaagtatgtaaagatgaaaacaaaaagcaccggaaatgctcttcatagctgacgttttcttattcactttttattaaaacaggatgaggcgtcctgccttttccagccttatctaggaagtgtcttgccaggtcaccaaatggcaagcagaaccgtaagctgaagttgtctgcctagaattccactgtggcaatgttcagcatcccgactggacagctccgtgcggcggcatcgggggcgcggcggcatcgggggcgcggcagcatcgggggcccttttcatgccattcaaggccccgtggaaacagacaccacagctcagcatgagactgtggccccacctgacctggctcatccatccccagcctctcgtggtccccggccctatgccgacatttggcactcgatgagccatttctccacatttcaggagccttgttttaagacagcctggctgtctgagagccaccggagtcgagactggatgcccggcctggtgcccgtgggccagcaccgcctgaggaggaggggtctctggaggccacaggcagagccactgagagggatctttaagcagagggccccacacacctcctgggacccacgggtgtggctgccatgcagggtctgggagctacagagagtcgggaaccaagggcgcggtggctcacacctgtaatcccagcactttgggaggccaaggatcacgaggtcaggagatcgagaccatcctggctcatacggtgaaaccccatctccactaaaaatacaaaaaattagccgggcgtggtggcgggcgcctgtggtcctagctactcgggaggctgaggcaggagaatggagtgaacccgggaggcagaggttgcagtgaacccagattgcccactgcactccagcctgggcaacagagcgagactccgtctcaaaaaaaaaaaaaaagaaagaaaaaaagtaaaaacaagagagtagggagccaagtccctgggttgccaagtcaatccgtggaagcccctgacttcgagcaggacacagggccctaaggacagccccagcccctgcagtgtggcctgcaatgggtgtcattcattttgacctggctgttgtggttttgggtggtattgttatttgtttgaaaagaaaacacatgggctgcgtatggcatgagcaagtacagacgtcattgggatcggctaatgaaaatgacagagtactctaaagtgacaccttacagggacgtggtgatgtggcaccaggcccagtggcaccagcacaccaccgtctcgctggcatttccaccgtggtccctgttaaaccagaaagaacgaaagtgtgatggggaaaaataagtatgtgtttcttgtaaaacacagctcatttcaaaactactgagaacaaggggacagtttgaaattgggcagagccccttgggaccagctggaccaggaagaaggtccaatcagctcttcctcagggccaggaatctctcggtcactccgaggcctggaagaaagtttccagaacctttttttgcacaaataaactgcagatctgaaatcagcaagaaggttcaggacctgggcccccaggattggaaccacgggagtctcagatcctcaaactagctgggtttgcttcagttttctcaggtgggacgggccaccctgggtttcccagggtgatgtcccaacagtggaggtgagatgtcacagaatggaggatgtgatatgatctgtaacatggaatccagcagaagctccagcacttaaaagacaggaagcagtggagggcctgggtgtcccagccttcatcattccctcacctggagcagttggtgtcctcagggaaggttctcattcagtccatgcctggcagatcccatggaggtgcccgggtgattctggcacaagggctggaagattccttctttgatccctgctggtggccggagctggctcacaggcctggggctgctcagctgcaggacagtgggaggaggtgggctctgggttcctcaacccggctcacagccctgctccgactgtccctgctgggcacccctggcggtgatatcatcagcctgggcctccgtttcttttttcttttttttctttttcctgagacggagtcttgctctgtctcccaggctggagtgcagtggcacaatcttggctcgctgcaacctccacctcccaggttcaagtgattctcctgtctcagcttcccgagtagctgggactacaggcatgcaccaccacgcccagctaatttttgtatttttagtagagacggagtttcaccatgttggccaggctggtcttgaactcctaacttcaggtgatccgcccaccttggcctcccaaagtgctgggatgacaggcgtgagccactgcgcctgccctccatttctttatgaacagtgtgtggtcccagcatcctgaagttggtgtgaggtgcaggtgggacggctttggggcaggccccagtgcagacggccctgctgctgcccctgcccgtgccgctgcccctgcccctgctgctgcccctgcccctgcccctgcccctgccgctgcctctgcccctgcccctgctgctgcccctgcccctgctgctgcctctgcccctgcgttcctgagcaggccaccatgctactctttgggagtcctttttcttctttttaaatgaggcttgattggcttagggagaaacaggagacaccgcataccatgcagttaaaaatgaaactcggattaaatgaatattgaattcagtactgtactggcttcctagagctgctgaaatgcaaactgggggcttaaaaccacggagacgtattcccccacagttctgggaagtagaagctcgaatgcctgttggcagggctgagctcctctgcaggctgtggggaaggacctgtcccatgcctctcctggctcctggtggccgctggtaagccttggtgtcctgtggcttgtagacacatctctccaagtgctgcctctgcctccatctccgcgtcttcctgccgcctccttataacgacggcagccattggaatgggggcccaccaaaatccagtctgactttgtcttcatttaactgatgatatctttaaagatcctgtttccaaataaggtcacattctgagcatccaggggatgcgagttttggggagactcgattccaccaacaccagcatcgaagagggcagggcacagagatgaagctaaggtccagggcgcacacactgatgggcacccttgaaataacggcaaggttggtacgggcacatctcgatcggaggggccgaggggtgagggagggtggggaggagactcccagaatgggagacaccagctaagcagtggggctgggagagggctccaggataacaagcagttgggcgggggacgacacaggagagcacacagcgggggagcagggcaggggacgacaagggagagaacacggccagcccaggatcctcgccctgccttcgcctcgagccccagaccagactcaccctgacgatgcctgctccccatctactgcctccagggaccccctatgggttcccccactcataaagaatgccgaggagttaggaataggacaagcacgtgtccctcaaggctactgttgggatgcccaggacttgtctgagcccttctctagaccggctgctcatccacccgctgcctctaaaaccaggtaagagaaggggagagagagggtcaggagatgccctggcccaggagcagaagctcccctggaggcctcggtctgtgggcctcctgcaggctgcacagggggggccacagctgtcctcacccaggggccatgccctcccaaaaggaggccaccagaggccccttgtcccacatttttggagtgtggacagccaaactgggtcattcagacccaacctggtcactgtggagggaatgggctgtgccccactccccacccaataccaggccgaggccagcaggtctgagggtccctgtggagctctgtcctgccccagccccggccagctgtcctactggctcctctagtcctcttcttaggtaaggctgagaaagtgggtcaaaggcaacaacctcagagcctctggccgctcctacctgaagggccggggctctgtgtgggtgaagaccggcagcttcctggagtaaccagagggctgagcctcctccttgacttgttcggagtgtttcttcactgaccggtttacctgggtgtgcatacggagggtgagccactggaacagtgaaagcgtccacccttcactgagtcagtccctctcccggaaggggccagggacagggcaggatggctgggcattgcaggagattcttcccctctggccacattctccccatgctggggaggtgggggtcagaagcccaccaaacagacggggaagtagggacaggtgagccagaccggatagtggggcaccaccctgtccctgggaacccccatgactgcctcgtctccatcccctctaaaatgccaggtccacaaaaccacggtgagatgccaccgcacacccattgggatggctaccatcaaaacacaacagaaaattacaagtgtctgcaaggaagtggagaagccggagcccttgtgcactgctgacgggaatgtgaatggtgcagtcgctgtaggaaatggtcggtgagtcctcagatggcatggtgatcccacaggcagttcacacgagcaggaggtgggacactcaaacatccatccacagatgaatggagacacagaatgttccacaaaatggaatattactcagccttaaaaaggaaggaagttctgagacatgctacaacacaaaggaaccaggaggacatcatgctgcgtgaacgaagctggtcccaagaggacaaatgccgtatggttccacgtgcacaaggtccctggagtactcaaatccacagaggcagaaagtagagtgggaggtgctggggctgggggagtgagtgtttaatgggttcagagtttcagtttgggaagagggaaaagtttggaggtggatggtggtgatggttacacagcagtgtcaatgaacttaacgtcaccaaactgtgtgctttcagatggttaaaatagtaaattttatgttatgtgtattttactgcaataaaaaaatgttaagccaggtcccatagttcagcaagaaccaaaagggccacaggacctcccagtagctccctgccccgtccttagaaacctgagccccctctggcacggagggaggcctggcacaagaggctggcagtggggtgggccttggcagcccacctgcagcctggcctgggctccacatctgcgaggactacaccgggtgctcccaggagctccgagttctcaagagacacctcagctttctcatccccaaaacctccttctctccattcggagcgtctcccctgaacccgacatgcttccccagtgggaactatgctctcccctgccccaccccggtggacgggtcctgctgctgccctgacaccctggcacttcaggcagccactggaagggcccagaaccaggagcacaggtgctcctgagccatgcccagccacccccggtgggggcaagctccgtggctgcgccacgccctggagggctttagaaagcagctgtgtttgctttgcccctagatgtcacttagaaacagtgtgtcccataattgttttctggggatatttttggctttttttttttttttgagatggagtttcgcccttgttgcccaggctggaatgcagtggcacgatcttggctcactgcaacctctacctcccgagttcaagcgattctcctgcctcggcctcccaaagtgctgggattacaggcgcgccaccatgcctggcaaatttttgtatttttagtagagacggggtttccccattgtggccaggctggtctcaaactcctgacctcaggtgatccactcgtctcggcctcctaaagtgctgggaaacaggcatgagcaactgctcccggccatgtcccataattgaatctgtgctaccaaatttatattttataaatatatatttttaaaaattccagtttgtagcaaagatggtactgtggtttgaaagtgttccccaaagttcatgtgtcggaagcttgatccccaacatggccgtgttgggagatgcggtctcatgggaggtgtttggaccgcaggggcacgaccctcacaagtgggttaatattttattacagcaaatatatactaagtttgttggcctttgttgggcctgtttattacatcttggattttcagtgactttttttcttctacctgagtttaaaacagtgcacatgaaaggatttggaattttaaaacttttttcttgatgataaaattgaatatatgattattataaaaaatatatatgaaaataataatactaacatataagaaataattcataattctaccactcagatatcatcactcagtattttggtgcatttttttctagttgaatagatgtaaatttttaaaaaataaatttggattgtaccccatatgaacactcttatagcctttctatttgtagaaagagaattccatgtatcatatataatttaaatacattattcttaatatctaatatctcatgtttaacatgtaacattcccatttatttaacatttctatttgtagacattattgtttctacacgttactataaacagtgttattgtgagcatctttcccaaaactcttaattcctatgtgaaatttttccctaggataaaggcttaaaaatggaattaccaagtgaaagaggataaagtgtcttaaagcctttgatatatgttgccaaactgctggggcacccctgaccttaaactgtgccaacatttaagaattttcattttaaaaatattttgctaagttcagaagtggaaaataatatctgtattagtttcctagggcagccataacaaagtataaaaaacaagcagttctaaacaacagaaatgtgtcctcccacagttctggagccagatgtctgaaatctgtgtgggcaaggccatgttccctcttcagcctcctggcgagattcctttcatgcctcttccagcttctggaggttctcagggacacctgtcagtcgttggcttacagatccctcatccagtctccgccaccatcttcagatgggccggcttttcctggggcctccctctcttcttataaggacaccaggcattctgtatttaggacccagcctactccagtatggtctcactctaactagttaatctgcaaccaccctatttccaaataaggccatgttcttaggtacaggaggtgaggacttaacatacctttcagtagggggacacagttcaatccgtaatagcatgcatttattgtaatgggcacttcttggatttccttatggaaagtgattcttctcttcatgttcattggccatttgtgtttgagtgtcagttcttattttctgctccattttctattagtgggtctcagtcaaggctccctttattgtgagaggcagaaatgcaactgaaactggttcaagctaaaaggagagttggtggttaacataactaaagggcccaggatactacaggcttcaggttgagctcgacccaggctcacacaatgtttatctgttctattcccttttttcagcagcatccctcagttctacttccctgccttggctttgttctcaggcaggctcattccagtttgtagcaaagatggtgctatgctttgaaagtgccccccaaagttcatgtgtcagaagcttgatccccatcatggcaatggtgggaggtggggcctaatgggaggtgcttgggtcataggggtacgaccctcacaagtggattaataccattatctcaagagtgcgttccttataaaaggacaagtttggccccatcttgcgcgctctctctctctctctccccctctctttgtgtgtgtgtgtgtgtgtgtgtgtgtgtgtgtgtgtgtgtgtgtgctctcactttctcactcttgcccttctgccttccaccttgggatgccgcagcaagaaggccctaactagatgccagtgccatgctcttggacttcccagcctccccaggacatctctgttcattatagattacccagacttgatattttgttatagctgcacaaagcagactaagacaggtagctaacatcctactagttcaccgtctacagagaaagcatatcttttccctgatagtcccagccacggtcccaggcaagcccttcattggccaggtttatgtcatgtttaatctctggaggtgaagaatttaggtcagcacacccaaatcacctggactaagggcaggagggggtggtttactgggggctattacaaaggaaggagccacagattcctttgcacgggcaaaatcaaaagatgggcccctagtaaggaaatgcttatttattctgagaactctttttatattaaaggcatgaatcctttacctctttcttccatggttttttcttagttatttgtctctgtgggttttttttacaggaggccaaacgctgccttgtgagtgtggcattcctggggcacatttgccatatagcatcactgcataataacgtccaacaggagcatattgccaagacacattctctgggcgtgaacaaaaaaacaaacctgtggctagtacttcagtcagtgaattggcattcgaaagcgtgtcgtcattagtacagacgtcagcggtgaatgagaaagcaaagaacccgtggctgcacctaataaaaggccggcagggagataaaagctaccgtggttgtgcaatgatgggacaaaatgcccagggtcactggtccaggtgcaggttttgagtcctcactcaaaaatgagataaggaatgtgactttgaactcattagccttttgatcaggctatgaactaaaggcaaatagaacaggtggcctgacccctgccagagactggcactgcctgcgaggtaggagctcccaggtgggcagggaccagaggtcagtgacttggtgcaccctccactcatggggccgggccggcagttctccctccttcctcttctcctccccctccacgggggagattctaaaacccccaggaggatgtccctggtaacactgcttctcccttttcacgtcaggccccaagccctgtttagatcccagggtaacagcactgagcagtggaagagcccttgctacgtggccacccagccgtgggcccagggaggacgcgttcctttttgcacagctggccggagaagctgctgtgcgtcagggccaggcctgtggctgggagagcaacaaagtgtagggagggtcacggggcaactgtggcccacgttactgcccagacggtgccccctgtcctggaaggaggcgtcccctcacaacccctgcccaggaaggaggtgtcggggctgacagcagcacctgggaggtgacttggagggtctggggttggggggttgacaagggcgtgaacagttgggagatgggtgaattagaaaggggcaaccaaacaagtcaagcatcttcccaaatgtttcaaggtttaagagggcgttgtaacacacaatggtgtgtgagtgtgtgtgtgtgcacatccctctatgtgcatacatctctgtgcacacgtgtgcatctgtgtgtgatgtacacgctcacacatgtgctagcagaggaagcacagggagaggctcacaggcctgagtgacgtcagagacaggtatggcccacagggcggtctggcagaagctggcctggtacttgcctggctccccggcctcaccccctaacccagggtgcaggttccagccgccctctctccagggcagggcgggacaccctgagtgctcagtgggcttcttggccctcagtccccagaaggtgagggtccccatcctcctgggtgccccctaccccagctcctgagccacatggtcatggactggggaagcagagtccagactctaaggaggggtttctttgtcatcttccaactcaggacccttgggccaatcggagcagctcagcctcagtttctctcttcttcatctcctgtgtacttgaggggcctcccgagggctgctcccttcccagatgaggctgaagtaaaccctgtcatacaggtgggtgggtccctggaggggacaggccatgctaaagccaccaagcccccaaaagtgcgaaaggatgaacaggagggcggcggggcagagctgggtgccttggagtggggtgggggctggattcgggggtgggaagagcagagcaccttccctgcacggggagggtgccccttcctctgcacagacccgcctgccccctccactccgcgtggcccaggggagccaggcctggaaggatgtcgtgggcgacgctagcttggagtgactccttttatggggaaactttggaacttcatctgagaaagccttgtgctaacccagggccccgcctctggccagggcaagacaaggaagccatccacagtcttcaagactgttgctcccgggacggtgccatttcctgtgggagcttcaacactcagaactcaccctggcatgcaggaggctcacatgacgcccttgtcaaagaagctgatgggtgatttagtgaacaaatgattcacgagcaaagaaccaaaatctctccgtgtgtgcctgcatctgtgcttgcgtgtgtgcgtgtttgtgtatgcttgtgtgcactacacgcaagtgtgtgtatctgtgtatatgttttcttgtgcacgcctatggatttggttatgtgcagatatttgctttgtgcacgtgggcatgcgtaggtgtgtgcatgtgggtttgccgtatgcatgtgtgtttgtgttgtcaggtgaatgcaggcatgtactcgtgtgtatgagttactgtgtgcatgtgtgtgattttgtgagtgcttgtgtttgtgtatgcgagtttgtgtgtacatgtgtttgtgtgtgtggatccatgcgtatgcacgtgtctctgtgggtgggtccgtgtgtgtgcacatgtgtgctctcctttaagctcacccctggccaagcctcttggagcccagggctgcccaggaactttgtggagcatttaggggtgtttcagtcaagttggaaacaggctggggagggatggatttgttgtgacctggaggagcgggtagatgacctcacccagttgcacacagagggcgtgggttaggcaccatgtacttaaacttggcattgaagtagaatggacattctggaaggagacgtgacagggattttcacccccacaaacgctcacaagggaactgcccccagggagctgtccagatacccctccaaccctccagtcacccccactcccctggaagcattatccactgcgggcactttgtgtggccagaatggagaaccctgcagcttcttcatgtggcgtttcctctgcccaccctcccagctccagctggcccggtgcctccaggcaccagccctcagcagcaccacccactcaagggttcatgacagatgggtccaagcagggaaaagtggccccaaggactctgagcaggaagggattgaacacagggaaggggtatcacaggacccaggatgggctgcagactccagacgggcctcctgggagactcaggcacagagtgccgccccaccaggcactgtcaccacggcagcccccccggagccgtgccgggagcataaagccaccagggccgctgcgttgccactgccttgcacccccgggagctggggaacagacccgcacagccgtgaccacctgaaagccagatgagccaggggaagcagctgcgcctgcagccacccccactccagcatatggagaacgcggcaggacaagctggtgtctccgtggggtgcccccgttgtccccacgtctcacatacactcgcctgatgggtggccttccccacatccgggaccctggctagagtctgaaaggcggctgcccacgtcccagctgcccctgagcagggaggccggcaggggatgcacggcgagttctctcagtggtcggccgggccccagccccctgggtgctgcgaggggaccctgtgagcctgctgatggccagtgagccgcggtcctctggtcctagccggcctcgggtctgtggtcctccgggcaggacgtgtctggcaggccagaggcggctcctgtgtgcgcggaacagccgcttttacaggggcgtcggctcgtggcgctggcagggcttctgtcgcaccagccctcggcccgcggcaaatgccgaatgccggtgctgggaacggaagtgggaaatgacggggggtgcaggggagcggccctgactgggactgtacggggacgcatgggggtgcgggcacttgagggaggaagcagcagagggaggtgtgtggatgtgtgtgtgtgcgtgactggggtgtgagcgtgcccactgtgggtgtgcccgtgtgtgtggctgtgaggcgtgagtgcaggcgtgaagtgtctgggagtgggagcgggcatgagtgtgtgccacgggcctgctgttgggtccttggaggccacggttgcccctgaagggactgcaagctcttttttgatttgtagttatttgagaagtctatacaggaagaaaattaaaccgcatttactaaatacaataaaattacaggaagacagaattgtccccaaattacaaacatgtggcccgagttgctccacgacagctcagccccagaccatgcagtggagatggcagccccgagccccgggcccatctcctgctccccactgaggtgacacaggacccctgtaaggcaggaccccagagccccgcacaggagggggggctgtgtggggggagggacccctgcctgctgtccctgcccagcctgcggtcccgcccccaccaggcagcggaccctggactgctcatgatcacggcctcacctggaaagctgctatgggctggtctgagcctcttccctctttccgggaaatctgaggcccaccagcagcgggcagcaggtcatgggtatggtcgcggacttggaggcccaggaaggccaccaaggagcaggaagggccgtgtcctgggatcagagtctaggccagagacccttcccaaggctgtcacccaggagggagatgatgggaagtgacagtggggcccaggctggaagtgagaggggccgggcctgtggcggagtaagagctggcttggagtgggcagaggccaaggcagccgggtgggcaccagacttgggagatgctcggcctcgcaccgagaaagggggggcgctggggccaagtgcccactgcccggagagcagggctgggtcctcaagggccccctgcttttggatgttgtgcagccactgaagctgaagcccagtcgccccggctccacggtccagactcccagcaggtggccacccctgaccacctactctgaaatccaggcacatcctggcaccacccggccaagagcccacatggccccggggcattcatctcactgggcaggggcagcctccgacctcatcccagctcagtaggtgctcgcggtgccctcctaaacgccagccatgagcttgagcgaacgccagtgtgtcgtgaggctgagcacagcctggcccctccactccggctcctggtggctgtctgctgtgtcccctatcggggaagaggtttctctttggcccaagcccacctgcccctgcctgagggagccctcagccactacgctcagcccgtcagaaacctgagagctcatgtccacgacagggccagccagtggggagaggacccggggctcccttggaggcagggcactgctcgttcccgcggccgctcggccccgcccgctccctccaccccgatttcccacagggcttgcaggcatcgccccaaacagactctgtcacccaagccatgtgcctgggcctgcctttgggtgtggatggggggtgcctggcggggggtgcctggcggggagtgctctgagtgcaggagcggacacccaggctgcccgaggagggcagggcgtgaggactgggacagccgcacccctgctgcttggcacgacccagtgaaggaatgacgtccgcaagggccacgtgagcttggggcgggcggtgccggtggagggagaggcagaggctgtcagcctctccccacccctgcctcacgtggccacgcccgacgtcaccgtgtctttctttgtgagagctgagtccaccgaccccaccttgtttagattaggttggaagtcacctgggctgagctgatggctgattccgtcagcaaaaagaactgtggaacatactggcacttgggccggtgtgaagccacccccctgccatgaaaaatggctcttccctgccacagccggcccagcgggagccaggtcagggcctggagacacagcgccccccaccggagccactgcccggcccagcagcacctgcggagaatcccaccagctcccacgcctcccgccgcgccaccgccccggctttctgcaaatccaccttatggaagccggataaggtgaagtccacatataactaaaagcgagttactgagggttactttctttgcagagtggttcccctaaaggattcctttaaacatgatccggtcagccagtgctcacttacgttcaccaagtcacgtcggtttgtggcggcaggagcccagcgtgccaggcacctgcgggaggggaagatgctgggtggggccctgctttcgacactttgcatcttaagcaggtgagcagacaggcacacatttgctcactcagttccttggggtagctctgatgggcagggaaaacacaccaagggccaatcgtgtggcaccgactcgccgtctctctattgtattttatagaaacggtctcacattcgcccaggctggagtgcagtggtgcaagcatagctcattgtagccttgaactcctgggttcaagccatcctcccaccttagcctcccaaagcgctgggattacaggcatgagccaacacacctggccggcaccaactctcagccacgctgtcgcagacagcggggcccctgcttgctgctggatgtcacctcccagccctgagaggctggggatgggagccggcagcactcctttgcacagagcaccgcaggaagcactggaatccggaaagagagagggtgccgtgagcagacttcccggcaggcgtcaacctcctgtgtggtcaggagtgcaggcgctggggccggaaccctgggcactcgaccacaaccgcctgggcaacgtggccaagtgggcgcgtgtcctggggctcttgcaacaagccaggtggcctcaacaacagatactgattcccttacagctctggggaccagaagccccaaattaagctgtgggcagggctgcactccctccagaggcgctagagggggatcttccttgtctctggcagcttctggtggcccaggcgttccttggcttgtggctgcctccctccagtccctgcctggccctcccacggcctcggcccctctccatgtggctctccctgggttttctcttctcttcatgaaggcgcttgtccttcacaccaggcgctgtggtccagcctgacagcccaggacgatcacgctgccaggtcttgacctgattatatctgcaaagacccttttttcaaataaggtcatctttacaggttctgggacacagacagatctttctgtggggacaccattcaacaaagaggggaagccacagccagacccccctccgctcaaaggcttgctgtttcctatgttgcccgccacactccgtgtctatagagctgggacagtggcagtgcccacctcagaggtcaccgtgcagattaaattcatccctagacacgaagtgctgggtgcaggcacagagaactggaaggaaaggtttcctgtgaccgtgtgctccttctgccctcggctcggggtctctgctgtgctcggcgtgggtggtgatgaggatgtcactgggtgcacagctggccccgcaagctgcccggaccccaggcctcccctctttccagccaggatgttgtgtgctcacagcctctcagggccacaggtgcagtgactgctgctgctgtgtgcttatttgctgcagagactccactggggccaggctgagcaggactccccagacatatccagaggtccttcgagagggccgcatggcaggcacagggttgaggggcctggtggcatggccacggctcacctgggagcgcaggtgggaagcccccacacctagcagagtgcagctccttcccgcacagccacctgcgctccttggcctgaccccgtagggctctcaataagaaacgggggcttcccctcctccagtctcaccctcagtctccacgttgtctccacctagcacctcctcctctgatgcgtcacagtcacaggtcctggtgaggagggagccacgccaagcacagcggctggaacaggggcaagtgggtgcccaccccgaagtgcaggcaatgaacttgtgctgtagcccatggtgagctgtggggctgtttgtgactgcagcgtagccaagcccatcccgcctgatgcggcctcttcatccagagtgggggtgacgtgccagcccccacctcaccggaatgctgggaggagcgtctccacggaaggagctcactttgtcagctgtaatgtgctgtgactatcgtgtgagttcccgggtcactgtaacaagtcccacagcctgggggcttcaacagagagagcctgaatggctctctcaccattcaggaggtggaatccagggtcagggtgcggctccgctggctcctgaggcctctctccttggctctgtctcctgctactgtcctcacaaggccatccctctgtgtgggtctgtgtcctcatctcctctccgtataaggacaccaggcagattgggccagggccaccccaccagcctcatgttaccttaaccacctctgtgaggaccccatctccaagtaaggtcccttgcggaggcattggggcttagggctgcagcatacagatctgggggagacacacggcccctaacagtatcaagggtgggtgggccctcataggataggacagccgcccagtggggagacacgtggcccctaacagtatcgagggtgggtggacccccataggataggacagccgcccaggggggagacacgtggctcataacagtattgagggtgggtagagcccgataggataggacagcctccgggggagacacgcggcccatgacagtctcgagggtgggtggacccccacaggacagccgccggacatttcctcctctgctagtctgaaaatcacactgtcttaggcagacagggaagaatcaacatttccatgccaggcagaggcccccggagcgcaaaggaccagaggatcaaagagcaaacgtcaccctcagggtctaacgtgcaggtggcaggaccccggcccttcctgtgtatctgattgtgggttttgtctctgccacgtgcagggatgggtgcagactccgtccaaggtcttggcaggaagagaaaactgccactgcagaggggctggctgaggggctgggatggggtccccggggcgcggagctgcacaccagcccctcgcacctaggcagaaggtccattgccctctgccccgcagcctgcccgttcccaggccagcgagggcgctcccaggccggtctgcagccagaacacagcccgttccatgtgcttgtcctcgggacacattaggaatgaacccaggcctcagtcctggcctcctcctcaaggctgggtgctcagacgtccccctcagcccctttctctagaccttccggctgaacaaacgagaacatctcacagccctgcaacagccaggagctgctcgtggagctccacgcccggctggagagagaggaggcaccctgggcagcccgccagcacccaggctctcacagtggaagcccacgtcttcttgggctctattttgaaagctgttctttccacgacggctttgacaagaatcgatttgagtgagccggcgtgtcaatacaggccagcacaggactggcctcagggccacattggggagggtggcgaccaggccctggctgcagcccacgtgggcaaaagcatggccaggcaggaggtggggcctgtgagcttggctacagcgaccgtgggcgctgggcccggggctcctcagccctgaggggagacccaggcccaggcaggctcccaggcgggctcccgggctcccagccttccgatcttctccctttgagaccttgccttctgcacagtgacaggaaagagccctgagtcccactttgcagggatgtattgcatttccagaaagttccttccgggtgcagagtgatacatgaaccctggggactcactccaacttggtattgattttctccacggaggacccagcagtcacggcccgtgtctgcacagccccttggatcctgcggaggaattcagccggcccctccccctgtgccgaaaaccacggaggcaaagccaggccaggttcaggttccacgcaaagcgccctcctgtagccaagcccagccccatgaggtcaggaggcctgggtggggtcccaggtggggaggccgcctgtgtggggtcccaggtggggaggctgcctgtgtgggggctcccgccagcgcccctccccgctcatggaggcacagggacagccatgtgtgcccgcaggacgcctggctctgcccactcgcccccacagcatgctgaggagctcgggctttgctttctagggtacagtgagaacacgggagaggactgagagaccgctggctgccgagggaggaagagcaggattcgcacccccgtcatcgctgggcccacacgccgccgacagcttccgcgtgtggccatctgtctttcagaaaccctctggcagagggacccagcagatgacacgggggccgttcacactctgaaacctgcctggagtcaaaacactgctggcgagcctccaccgcaaacccaatccagatggtcttccctggtggccctcggggtggcgggcaccctgcccactccctgccagcccctgcccgctggactccaggcccggccgagcccccgaccggtctcctgacccagcatgctgctctcccctgggcccggctttctcgcccgctgggactcccaggcccctccagcccagccccgagagcaggagccccaagggaggcttggcggctgtggaggcgagtgggccacgtgtagctgggaggccggcaggaccaggagcccctcacagcgcagcacccacagcatcacgagccacttccactcctgggtggcctgggggcccccaccctgctctgagctgccccttgttgtgacctggggtcccccgtggtgggcccgccccttgagcctgggatccagcctcagcgaggctccagaagtgtcgtctccgccggccaggcgtcagcgcctccacccaggatcacacactcctatctctgcacttctgccctccatcctgctccacgccgcctctgcttgttattccagcacattccagggtgatgcctgctgaagccacgcagccagtgcctccaccctaccccccatctgacccaccggccccttccgcacgctggaagcctgcccggcctgaagtgtcctcacctgtcgccctatcctcccctccactccagcccaccggtgactcagccctcacagctctctcctccccgagggagccggtgacttggctctgatggtgccgggacccagccccggcatgttcagaatccttgtcctttaacctgcgtccacatgtagtcgcctccacctccctgcctgaacctccaggccctgcagagcaaacactgctgcctgcaggagacccctggggccttctccgtcccctcatcctcctaaggagcctcccctgccaccgtgccagaatgtgccggaggaacagaggcccgagcctcccgtggccccagcgaggcttcctctggggaagacagtgagcccaacgccctggctctcgaggggtggacggagtccagctggcatcgaccgggtgcccctcttcaccggtgtccacagtccttgagagcaaaggtggtcccagcagtggagcagagggcaagggtggggcatgtagagtctccagggagccactgttggttagagagggagcccgaagtgggctccggaccccagcagggacagcgtccccttccagcgggggcagccgattgatctgggcacacgagcaggaggagcggcgccacccagggctgacctcacggccctgctcacgtctcggggcattttggcagacccacctagacctgggggacagcctgatttcctgcagccatgacctacaagggtggcagctctctcaggcttgagtaaccaggacacagacctgggccatttaatgcgcaggcagccccaagtcccggcagggccagaagcagagacggcggctggggatgaaagtgcacgctggtcccagatggggctgggggtgaaagctgcatgctgatccctgggccccctcactctatgagctcctgaaaggagggaagcccccacaccctactgagtggagtgctccttggcctgggaccccgtccagtgtctgctgctgtgggggcgggctctgggcagagagaggccagacaggcacccaggaaagctggaacacatccctcctgcttcccccagggttcccagaggcgacctccctcctgcacaggcatttgtcatccttaccctctaggacagctttgccatgtgcagtgaacccctggacagtgttgcgtgccactttgccggatttggactgtatacagaccgaagcatgtggcatgaagccttctgctgtcagcaagttccttgtccctcgacagtatgtgcccaggctgcccttcaaggtggcagtgatggcagttgtctcttgcacgctgcgtacagttctgtcactgactcttacacacagccctggagacgggagagtgccgggagcattctatgcaagtgtcctggcctttgcgggcgtctccacagcacaaacacgagtcagggaccacccctcttctgcttccatgattccaccaactgggtggggcagagcagtgccagggccggaggcacgccccaggtgagggcaggtggccatgccagtgagtgcactgcgttctcagttaattcatccgaaatatttctaagtttcttgattattgcagttgcatccccaagataatgccgccctcaccaagtagaaggcacatgtgctctgatggcccctcccacactggggtcagggcacagcaacttagcgaggcgacgtgggggctcagaggacctcggaccaggctcggcacatggggcttctccagccagccagggggaagcaccctgcagactgctaacttttgcaaaatagagtaaaaaagatcagctagaaaaataaaacaaaaaaggaaagatatacaaaatacaaggccatttatattgttgcatttaacagtcatcaactcactccgtctgaggggcgttggcatctgtggacacactcagtgccgaggtttgtcccactgcgggcaggcacaagcggcttcctgggggctggccctcgcctgctctgcgtggctgtgctgcatgggacactgaggcacccgtcggctgctcactgcctggctgcatctgtgagggaggaaacgagctgggtaccagctcagcctctgaagaccccacgggtgccctaagctgtgatgtctgtccccaaagttcattttgggtgggagtgctgggggtgcagggacagagggttccagctcacccagggccagccctgaccagacggcaggaaccagggtctgcggctggatgcagacggcaggcagatcattctggggaaatccctttcttaaaccacatactgtcctgggctgagcaggcccccctaaaaactcatgtcaactcagaacctcagaatgtgaccttatttggaaatagggtctttgctgatgtaatcaagttagggtgagctcacactggagtatggtgggccctcatccaatgacggcatccttgtaagaagagggaagtcagccccacagatgcagggaggacagccacgtttcaatggaggcagagactggagccacacagctgcacgcagagggacgcccggggtcaccaggagctggaagaggcagggaggaccctctcctcgggcctccagagtgggcaggggcctgaggatgccctgatccccaattccagtctctagagctgtgagaggctcagcatcttagctccccagcgtgtggcctctgtcagggcagccttgggagctgagcctggcccctaactctcaggagctctcccacagacggggttctgcatctcccgagcacgtccgaagccccctttccacaagggccactgctcgccaggctgacggtgaccgccacttccctagggacccaccttctgttcccaaaggccctgcctgacacctggccactcagccccaccccgcctagcctgcacgccccacatgtccacggggtcttctctgaacgggcctggcctttcggtggggaggcgaggactccatttgagggctggcccctgattgctccagcatttcagtgacattgtgccccaggccgagggaagactctggaaaaacttcccaccaaactcctcttctgcagagttgagctgacaggaagtctgtaactttcctgcaaaacgttattctacccccgccaggtgagctgagatggcaaaggctgacgacaagggtcccgggagtccccacagctatgggggagggtaactggcccccccccaccctgtggggaatagcagcaaagcttcacacaacccccagggccagtgtctgctgctgagcgcaggtcccaccagagccagcacgaaagccatagaaagacaacctgaagtcaccagtgtccctcggcagaaggaacaacccgtggtgtctcccgctccctccctgcacagccatgaaaagaaagggcctgtgtactctaacagcagggagaacacagtccccaagacccccacaggctgggaagtcagagatcacaggagaggtcacctctgggggtcatgactcgggggagtccctgggggggaccaggggttctctgtggttctggcgtgctcttggagggactcactgacacgcacggcggttacacgggcgcagacacgcaaagacctgagcacgagataagatttgtgtctttcgtggtacgtcagctttaccccatttttaaagactttcaaaaatgttattctgggcatatgctttgaacagattgtaaccccaccccagaaggaggaccttggatgtggagctggcaagctggagccgcccagggctgtccgtctccctgtggcttcttctccaggaggctcccgggagcaaagccgagtcggcaaggccatccgcccgctgagcaggtgttggctgcctgggtggcacttcctgtgctgaggctcagggctctgagccctcatggcacataaggtcttgaggacagtgaccacacagcccaatcggccgggcaggtggacttaggagggagagccggaggctgcagagtgtgctccgaggtaccctccgcctgggactgtaagaacaaagaaggctctggggtaaggtgacagggacaactccagcagagaagcggagggaggggtggagacagcacgagatgaccggagaccacatgttgggtagtgccggcggggggaactatgggaaagggattgggcctggcatgaagacccccagcccagccccgtgggggtcctagcaaccccagaagtcctgctaagaccctggcacagaccccacttccctgagactcagcttccccatctttaaagtgaagcctggcgcctgcctgtgagtgcgctgaaaatcagatgatggcagccacagaggcgctcagcacagcgcccagcgcagggccgggacccagagtggactctaccgtggggctgcctcaaagaaatctcagcaaacacaggaagccagcccacccgtgcagccatggggccaggaagcccgccctttaccaagtcatttgggcattttttctctgtgctaacagcccagatggagccatagcctcaacctctgtgttctgataacaccaagctgggacgccggagccatgcaggggacagtgcccggcctgaggctgcagcctgggtctggatgcctttctaattcagggcctcctcatggcctggttccataaatggtcaaatgcagcctgacagcgcagcctcctatcagcgctgggctccgtaccgccacacagcccacataccccgttccccaggagacgcccgcaggtgggcagcgtcactcccacccgccgagcacacgctgtccccgtctcgtgtcccgaggagccggaagcagctgcttcctcccagcctgaaagctgcacctcgggctgcactcggctccccgaacccgccctccgctgccctgcaattcgccaagggagctacccttcccatataaaaatttcacctccatttccttgtagagaagaaacatttctgacagcaaggaagattctaatttgaaaagcaagtgattcatctcccggtgccaaacagcagacgcaggcgttaccagtctgggtggggcgcccgagctggggacctggggtcctctgggaggggcaagaaggcagcgatgctggcccccgcctccatctgcccatcccatctgcttccacacaccgccctgccgtagctgcttgcagcccttctctgtcagtttctccatcttttggtttggtgataaatgagagttcccatcgggtgtgccaccctctgtgtgacggggagcagagaagaccctgcgtccaagtcctcctgggggaagagcgaagatgctgggaccagccccagctgtcagggggtctccaatcccagcagggaggccccacgcatggctaggatgccccagaccccaggaactgaaggaagtggaaaggagggcccgcagtcctaactaagggttcagacacccccccagtgcacatccaggcacgcccccaccccctaggcctggttctaggtctgctagctccgagaaggcccctaacaatgacgcagtcagaggggctgcgctgggctcacgctcagtcccactgccccaggggtagatccggcccctggcccacgcgctgtggagccttggagtgtctgtgcgccccttccttggagggcagccgctgaggggctgctgcgggaccggggagcctcctggcagcaagcactcccaatgcgttgctgggacgctgtgatggagacaagatcctggctttgaagaaagccctttccaccctgtccatgtgggggtctcccggtgcccctgagccagcggccccctcctgcaggctccggaggactcccctgcctgcatctggtctcgcatttcctccgtgacctccaagctcccactgggggcacacggctgccccgctgaccccaactctgaccctgtgccggtggtgggcagcatctggcatgggggaggtaccatttcttccacactcgcgcgtcctcagcccagatcatccggtgaagtttccccagcaagtggctccccctgccccctccaccctgccaagtgtggtccctgggcccccgacttcccttctcagcctctgcccctgggtctggggcatgcatccagccatccacgctcagggaggccacctcctccctcgctctcaaccaccacaaagctgcccgggaccttgttctatcctttccaaaagtcctcaggacctgcctatctacggagctcccaaaacgccctgtgagctctcctgggcccctcctctccttgctaataatgtcccacatggtgctgcctgcctggccccaaaagaaaaggaccctggagtgagttctgaacacaaactcgatgaaagtggccccctgctccacctgccgagtcagcccctcctcagactctccccttgggcagggaaacctgccgaggcctgactgtttcttcctgaaacagcctcaggctggaaggagagggatccacccttggccattgaagcattcagcaggaatcagccctcagggaccgagaccctgcgaccagccccgccccacaggtgccggtcctgggcagcctcccttgcttaggccacactgctcccaagaagccaggatgagcagctcgcaataggcccccaacacgcagagtgccatgcagaggacgggggcaccccagaaaactgcagacactgcatgtcctctgggagccccggccctgggagacgatgtgcagtggctccagctctgacctcatgagcccaagctccgctacacactgggtcctgacctgacctgggtcccggcggctctccggccaggcctctcccggtgcctcccgcccctgaggccggcacccagcatccaggcccctgtatagtcatcccctcttcaggaatctgggtcatggctgcaggataggggctacccagagcaggatgtggagggaggggccgcaaaagccggagagaatccacaaggcactatttagccacctgcccttgattctaattctcagtgacgagattctttgcttggccaaactctatcaggcccttgagccttctaggccacctgcacacttccttgcaaaatccggttttagcaagaacactgctaagtgacttcagccagaactgccccgccccgtatctgatcatcctcgtcagggcagcatgctcgtcctccggcacccaggtgatgacggatgaccccgcctcccttcagccagaaccctcccacccctgctgtttgttcttagtgatgttccatccgaggaccccactctgctcctgggctatcaaatcccactcgctggagccatattcagagtggagcctaaatctctctccaccactgcaaaatcccactgccctggtcccagcacccaccgcactggtcctgagtagtccccttccggtctttagcaaagatcattgaataaatttcctttcatgtcaggcacacccttaaatgcagacgtgtgtcctgggaggattaccaacactcccccggccctgcacatcagctgtggaaggtgagattgggaagtgctggcctccttgccaaggcttcagcctccatttctgcttttcaggtcatgttcgaacactgggggtcccaggagacccacccagaccaggcccctctcagggtgggaagagcgtggagcaagaggaggaggctcggcccaggacgttggccacaggctgacccgtgcagggggcaagggcttaagacggccccatcttccactccaagtgtggtctcaatcttgttggccagtttatgaaagtcaagcctactgactcagtcagggtcttggcaggaaggaggccagggcgcagacagagatagggatcgctccaggggtgtgtggccctgggctgtggggcagtcctggagcacctccaccccagcctgcagaacacccaggcggagcaggagcagagctgggctgtgtaggggttaggggacacggccagcccgcaaccccagctcccctccatctgcctccagtttccagccagggccccctctgccaaacctggcccgaggcaggggccagggctctgtctactggggccacagggagggtggggagggggccggagctcccagggcaaggggaggggccacccccaccccgtcacgcgcatggaggaggaggaggagcccacactgccccagcgtccaccccacgcctacaccagccccacatgagctcgggggtctctgggggtcagtgtctgcagctacagatgtgagcacgcatgcgggtgtgcaggacctttgaccgcagcctcccatgcacccctggaaaggtgccttgcctctctccctcactcgccatgtgcagggcagtgggcgagtcccagccagcatgggcatcccgcatttctctgcttctgcagccctgactgaccatggccccccaagtgggctccagccctccaggcacctccccgtgccgtggtgcccaccacagggcctggtctcagggctcctccaggactggccaagtccccaggctcctcccccacccatggggggagaggtgcacagcactgacgggcccctgggccactcatctgaactcttgagtcctcctagagcggtgatcccagccgggcagttagcttgagcgagccgagtacttacaggatgtcaccaaacacaaggtcccagcccacattccatgacctcagcactgctcacgacgtcctcctgagtccatgaacttcttgacggttctcatggcctcctcctgtggacagggcagggccggcaggtgaggcacctgcacgcacacctagctcgactccccaggcccaccctgcagaccctcggccctctcccttcttcccacccaccactctggagacggggcctccggtcctggccgcccctgtggaagaatgagggtgagcgaggggctgggtcagcagcacggcagtgggggagccacccagcctcctggaggaagcggccgggcagcgctggcaccgttccacatccctgctggagcaatggggccagcgtggccgccccacccagtcagtggtccccacctggctgagagtccccaggaggcagcaccctcttcctgggaagtcaggcagggttctatgcaggagccgacactcacagggctaccacaggcctgtgcggaccccaagagccaggaagccgcctgccgatggtccctcttagggactggatcgcgggcagctcagacggcacagagtgcttccgggtcgcagtgtcctcatgttgcggaggcctgagctccctggaggaaaagcaacaccttccaagccatgcggcggaacgctggtgaggctcaaagccctggaggtgacagcccccagacagaggcgtggaccgtgtttccctgtcggcccctcctccaacccctccaccaaccgctccgccagtggcaggtttcccacctgtctcccagccccctggaactctccccgggcctgcctctggctgtttgctgggccccccgtgggagcagcacagcggctgagtgcctgggcgtggccctactgcctgtgggtttccaacgggaatttagagtctgaaggctgaggaccctaggggaccacccattagggctgagggctctggaaagaagttcaggacaaaggagtttggggagagcgctgggctcattttcctggggcagacagaaccaagtgcccatcacggtgcagcttgaacagcaggcgttcggcgcctctcagttccggaggccgggggtccaaggtcatggtgtgggcagtgtgagccaccacacccagcccaagtcctttatacatcttctcagggggtctgtgtcttaaacaggaaatattcaaacgccctttctctaactgaagtaggttttcagattacttttacgtttataagatattgtggctactgacggtttattttttgcaattataaccggcccactttcccggggtctccctacacgtgcggggcgggggagagactccagagggggctgcgggaaacacaggggagggaggcctggggctggagacggcggccgctcctcatgcgtcaggggcctctttcgggccgccattgccttagcagcgccaagttctttctggggcaatcgccgctgttggtttcatctcccagcactgcccattggccgcagcacctcctgcccccacggtgcactcccttctgcggtcatttccttccctggggtggaagcaagtgtagagccagctcttagagagaggcaggccagccatctgcagagtgggaaccctcctgggcccccttgccctccccacgtccgaacctgtcccgtcccccatgggcccgcgcccccgccagcaacggcatcccacactgtgcgcctggccgtctcacacaccccacactctgggctgaccttcaaagggaagctgctgtttaaatatttaatcgtccttggagtgcctggacttaatcattaagaccctgaatcaaaagaggaaaaaaagcattttaaagatgactgaaggccgggtgcagtggctcacgcctgtaatcccagaactttgggaggtcaaggtgggcagatcacaaggtcaggagttcgagaccagcctggccaacatggtgaaaccccgtctctactaaaaatattaaaattagcctggcatggttgtggatgcctgtaatcccagctacttgggagggtgaggcaggagaatcacttgaaccccggaggcagaggttacagtgagccgagatcacaccactgaactccagcccggccaacagagcaagactctgtctcaaaaaaaaaaaaagcaaaaaaaacaaaaactaaaaaactaaaaaaaaaagatggctgaagcctgtgaaaacactgggttagtgatgcttgtattctcagccctgcagggctgcggcacctccacctccggcttggcctcacactgctcccggggtgttccctttgctctggaggcagggctgtgcaccagccaggcctgagaccctgtctgccctccaggacctgctgaccctgctagatcttcggtcctgccttgcccagcggccgactgaacagagcccctgtgggccctgcatggccaccagggggctactccacggtggggtcagggggcgagcgtccccctccccgtctcggggagggacgcagctcctggcctgcatgcgcccaccatggacggggaaggaaggggcgcccccttcagtgtgtgaacccccagcaatcccctctgcggggaccgcatgttttctatacagaaagaacttagctcaccagggacattttgctgaaacagcttgtaaaggatggcgcctggctggtgcctctgcctgctatggggtgcgggaggcaatgtgggaagctccgtactctctgatcgatgtatcggtaaaatgaaaactgctctaaaaagtagtcttttaacttaaaagaaaaaaggagaataattaggccaagggcttggccattttctgaacaagtctagttttgtgggtttccagctgcctctctgagtctccttctgggcccctgcagacacagccccctcctggggtaggggcgacctgccctgagcagtctgtgccccgggctcccagagctgccagtgtgtccaggctctccccagctatccgactcctggggagcctgccaggccggcagtgggtgggtatttgcttgcatttgctttgacaaatcgccactctgtgtggaggtgccaggagcgtgatttactgggtgtgtgatgactacggctcccgtagccaggcctgcccatcaagcagtgcttttggctttcagtgaggggtggactttgccgcgggggattgccggctagctgatcaggaccccaagtcctaagaggcaccgtgtccactccacctgcccacgggagctccgtgcccagcggtgggcccagagggacgacgacctcctgtagagggggcccccaccagtcctagcagccaaaggtgctcgaagagtgaaaggacatgccacactgtcctcctaacagcagtgaccagggcaggagagctgctatttctggcctacggcccatttttcagagtcaattcattttctaggcagacacacacattcctacaactcttttctccagatcattccttcagccagctggttctccaccgggattccaggaaagaatgaggccttgcaaaatgctctgaatggctgttcccaccaaaggtggtgggagccaagccctttccaggtacagagggaaagaaggtggtttcgtggggtcttggcgtcagctccactccctcccagatcactagtgcgaagggacatgccaggcctctcctctaggacaaaaactagtgtttctcttggattcactgaaacaagctgggctgccccttcttacagatggggcttggggcccgtggaggggaagggcctgcgaggtcctgttggtgataaccaggccagccgagagcccgggaaagggcctgtcctcagtctgtgccttggtgtcctcccacccagccacaaagggactcactcaaggtcacagggctgcagcgggctgcgttcaacccagtggcccccacacactccttcaaggaccagcatcccatgcccagcttctgccacttcctctctgggcctgtgcccagcagcaggacaacccttgccacaggcagagcagccccgcactctagtccattgaaaagcctggtgagatgccaggccaggccatgagcgcggagcctggtggcgcgtgtcaggaggcggcggtggcaaccttgacggtggtggtcctgactcaggagtctgactcacaaggactccagaggaagcaactgacaaaacgtgtctcccgacgggagggtggcccagctgtgagggcgtctccaccacctcaccatcatcgtcagagccacaggatttgggggacagaggaacatggtagacgacactacagagacagccagcagaacccagagtgtcggaaattctacaggacaaacaaaggaccaggtttcttcaacagataaacgatgagtgatgtgtgtgtgttgggggggggtgggggggacggaagctctgggcattccggagggacttcagagtcacagagagccttggacttcgtactcaaacaaaccaactctgaaaagacaggagacaaccagggaaatttcaacactgctagcagattatcacaaagaattcaagggtcgtgttttaggtgtgataacggtagcacagttattttttttggaagagtccctattctgtacagccacgcactgaggtatttctctgatgaaataaggtcagggattgctttaaaagactccagggagaggaggggtaaggggcagtggatcgggggagggaagaaggcttataggtcagatggggctgccatgatactgctccctctcaagttcttgatgtttagaaaaaatgtatgataaaaagttaaaggtatatggccaaaaattaacaataatcacaaaaacaagcctgtccttacagtgaggccaaactctttcctgtcttctaactctagcccaggggtcaaaaacaaagggaggaccacaggccccagggaggcgcaggaggaaaatattaatactgtcctttcaaaatctcatcttttaaaagtatttaaaatgcccatattctataatctatgtaatattttactattagctagtccatttgacaagtgttaaaaaatcaatgtatcaggctaggcgtaatggctcacacctataatcccagcactttgggaggctgaggcgggcggatcacctgaggtcaggagtttgagaccagcctggtcaacatggtgaaacccccgtctttactaaaaatacaccaattagctgggcaaggtggtgtgtgcctgtaactccagctactcaggagggaggcaggagaatcacttgaacccaggaggcagaggttgcagtgagccaagatcgcgccactgcactccagcctgcgtgacagagtgagactccgcctcaaaaaaaaaaaaaaaaaaaatcaatgtgtgtacatgtatcgggagtgtgcactcaaacttttgattgttaaaggagggttttcacaaaagctgggagaccacccttctagaaccctgcccttgtaggtccaaggctacgcgccctggcagacttccatgagctgcgactaccagccaccaagacggtgtgcccagccaaccctggtccccagctagctctgacccctgccctgccagcatcaccctgagattcttctgcaaattacagtcttctcagactgtctgtcgaccctggggtctcaatgctgggttctcaacaggcagaaccacagggctgcattgcgggttgtctttgaaaaatgacctgccaatagaaagttggggacgaaagccctccaacagtctgtccaagcgacccccaagagaaaccacagtggggtgctggagggtccccaacgaggcacccccccccctccgaccaccctgctgttacttccacccacatcgaagtcctagggtctcttctaatttcctacttggccgtgcctgaaatgccacttccaaaacccgcattcctatggttgcagaggccacaagggagggccctcgtggtattttttcaggacccaaaaccacgaagatgccaagaatcacaactttcacacaaaggacacactttctttgatggaatcttcagatcacacatcacaaaggcagcacgccatcagtctttgaaatgtcccaaaacacgtaaagaatgttccgctgcagatccggcttgtttcacgggtgtgtggcctcctcttccgaagtcatttcattcttcggggtctttgacacgctctggcaacaagcgcggagaggtgaacggggcagcgtttgtgctgagagtgggctgagagcgccgccctgcccactccggcctggggcatcccatctctgccaggttctgggctttgcattttcttttcatttcattcttcccaggcaagagcacaaggaaacaagcagaaggaattcagagaaacagctccaggctccagctcaaaggccgacaccaaaagcgaacacctctgggcgctcttgccttcaagaaggtggggaggctcacagacgcagcatccacccctcgcagggaacctcagttcctggcctgtggtcccatgaaggacatcaggctggcagattggagcacaccccttctttctaacccctcttgaaagcttccttgaatctgccagtcctgccccctggagcaggaaggaaaacagaaggcctaggacgctagaggggtcccgagctttccggagctccagccaccatcaggtctgactgctcagggacagacacaccgaccacatcctgacctcaggatgacctgcggaagtacttggcatttcttcttagccaaatcccttcattaaaagacgggtgagggttccagcgctgccctcttccttctcaaaactcttatttcagggctgaagcccagacgtccagcccgtcagaaatccccttagcctgagcttggcacccagaagctagagagtaaatgcacaggggccggggtctgagcccttccgcaaggatggggatgggggccacaatccacacacaccacaccacaaaccacacaccacacacccacacaccacacacaccacaccacaaaccacacaccacacacccacacaccacacacaccacaccacaaaccacacaccacacattacacagcacaccacacacacacaccacacacaccacacaccacatacacaccacacaccacacacacaccaaacacaccacacacaccacacaccacacacacgcaccacacaccacacacaccacacaccacacacacacaccacacacaccacacttacaccacacacacaccacacacaccacacccacacacaccacacacaccacaaaccatacacacagcacacaccacaccacacacaaccataccacacacaccataccacaaaccacacacaacacaccacataccacacaccacaaaccacacacaccacaaaccacacacaccacacacaccacccacaccacacaccnnnnnnnnnnctacacatcacacacctcacactacatacctcatacacaccacacaccacacaccccacatacctcccacacacaccatacacacacactagatctcaaacataacatacaccacatacctcacacccccccgacactatacagctcacatatacacaacacacacctaccttacacacatgccacacactccacatcccttacacacaatcagtatatatcacacatacacaatacattcctcacaccccacatacctcacacaaccacatacactacacacacatcgcacactacctcacacacatactgtatacctcacacatacatttcacacacaccacacacctcacacacagtgcacacacaccacacccctcacacgtttccttgcagagccgtattgtgtgtgtgtgtggtgtgttcatgtgtgtacttgtgtgtatatggggtgtgtggtatgttcgtgtgtgtacttgtgtgtatatggggtgtgtggtgtgtatatgtgtgtggggtatgtgtgtgtgtggtgtgtgcgtgtcctgctcatgcagagtgtccgcaaccacttctcgcctcctctgtcccacccgcccaaccccctggcactcctgtggactatgaccccctgaagccacaaaccccgagctgagctaaaccactgctcgaggtgcggggtgcgcagcactccacagcccgttgcatttccacgtcgcaaatcctcagggagcatttccttggagatacaagaagtgcatccacgtgttcccaagtcctttcgctcagggagtgccgactggtgtcggccttccagaaatgactttctaagcacttccatcccacgcagacctgcttcctgaagcccagcctggtctctctgtgcccgtgtgtcatccttgcccactcttacatgctgcgaggctggctgtgtctgcagccgcagccatcagaggcctggaggtagcagaagcagctctggtgtgcgctcaaaagctccttgcggcttgctccagccactcacttatcaccgtgtggagtagagggtgtgtgtgtgagtgcggtgtgtgtgaagccacaccaaactcattcccagcctagggagtgagcctcctctggcccgggcttaacaaactctggtcaatgtgacccacgcagacagcaagaggagggacgtccactcgcacagacccacttgacctgggtgcagctgacttcctagtcttcccttctatgaaacggtgacttctgtggcatgcagccctgccctggcccgcggggacacgcaagcttgggacccaggagagcaatgacaccggaagggccaggccctttgctgtcttgggggtgccaggccagaactccaagtcaccaagcaaagagggccccagagtcccctgtggtccccaaacctggccaaggttagagtcaccgaggggcctggacagatgccagggccagcccaggcctgccacggcgggggagactgccgggaggcgaggctgggagtctcatcatcaagcttcccggggctcttgctggcatcccacccagggttttaagggacatttggcagcagctggactccgagggagggggttgggggacgaccatgcatttgttctgggaatgctcttgcatgtgcccgcattgcccctcatgtccccatgtccatgccaggtggacagcgtgtccaccaaggccctgactgcacagccagctgtgctctcgggagcatgccactcggccggctctccggccctgactcagctcaggcaggggctcagcgcccagtctgtgcttgcaggtcgtcgctcaggccggagccgaggagcttcgccaggcctgagatacctagacaagaagtgccagctccagtgcctggggaggccaggcagggacgtacgccacgagggatgacgcggggtggagatggtggtgaacgcacagagtcataacgcagtggcttcccaccttcgccatgtgggaatgtggctccagggaactagactggtctgtggcacttcctctttgaaaggtaggccattcctctaaaagagctggaggcgtggcaggccggcagcacaggcactaacaaggcaaccagccactgtcagagcacaccacacctctgttctcaccaacctttcaacttacagaagaggagacggcctcgagacccagtgtgcgtgaccagttccacgtgccactagcgccagccgcctagaactccaagagaggaaagcaagagctcccttgccatgcgtttgctcagaactttaattttttctcctcaaggaaagtaaaagaaacaggtcttccttccactgtgcaggcagtcagcgagctcctgcaggtcctgctctgtaagcagaaagctggaggctgcaccccagatcaaggccctcacacctcaaaggttctcacggaggcctcgtctctgccccgcatctccagaatgtgcttgctggtcagagaagagtccagtgtggctcagacaaacacaatcacctttcccagcagccaggtccattctctgacaacatcccactgggcacagccacactgactcctgctgccactgcagccacacctgggcctctcctcccctgcaccaagcatggcaaccctctaggccatggcctcacctgccattaccccctggccccattacccctgcccccagctccgcatgtcaggtttgctgccctgtcctgcctagaacgctccgcaggctgctgtctctgtaccccctcctgccgaataacgactgttggcggctctgtgggttcatgtgcttcggaattaaaccacagggcctgcttctcattgccactgatgctcggcttccaagcccccatcgccacccaccaatggctattcagtgtccgcaatgacaagaacaccctggatactcccagatcggctggctgtgatggtgctcacaggcccaggcaagagccagccccagatgggcccatagtgctgctctgcttagagccaatgcctgcaccaggcagctaccctggaggtgcccctgtgagtgggcataggcaggtacacccccagcagtggcaggtgcagcatctcgggcagtcggggggcatccgcacaggcctgggtgcaaactgcggcaaatcccatgattctgcatacaagaagggtggggacgtgtgttttccaggggaaatggtccctgtcgtgcatcagattctcaaaggggtccagcacccaaacaagtgcaggggtcactgggggacactggtgcaacagaagcagccctggactgggagtcggggccccactgccgaccagctccaccctaaaaactcatcactcaccctcgtgtttcctagcagatagtgggaagagatgcaggcccatcgtgtgcacagaggttcagagtgagcgcactgtgagtggaaactgtcacgcaagcctcgggcatgacgtccttcccagacattctttcccatcgggcttctcgatccggggtgttggtgcctcccaggggtctgcggcacctgtgaagcagcagcagagccacttcgtcatggtccactgtgatggttagctctgtctcctcctggctggggctgggatgcatgacagctggggagatattacttctgggggatctgtgagggtgcttccgggtgagatcagcgtttgaactggcctcaggaagccagacgcccctcccggtgtgggtggaatcatttaacccagtgagggcctgactagaacaaaaaaggcagaggaagggagagctggctctgagagctgagacttcatctcctcctgggatcagacagcagcgctcagctctcaggcctgctgccgtggatggaattacaccccaggcagaggaagggagagctggctctcagagctgagacaccatctcctgctgagctcaggtactggcctcagctctcaggcctgcgccatggatggaattacaccccaggctttcttggttctcccacttgcagatggcagctcatggaatttctcagcctctgtaactgcatgcgccaattcctgtaataatgcctcttctcttaggtatctatatccatctctgtgtctgcatctcctataggctctgcttcgctggagaaccctgactagtacaggccatcttcctggggtacaggccatcttcctgtgtgggaagtcaaggcaggagcagaaggtggctaagtgaatatttaaccactatgcaactatattgaaacatatacacatcaagggtggcaagggcaggcaggccacaaggatggctgccagaggccaccatggcacttccccccaataccaggagcaaatgatggactcggccataccctacaaccatcctggggtatgggctggaacccccagggagaggcgggcagcagaaagcctgcaggcccccagctttgtaccatgagaggtgtgtggggcccaggtccaggtgagcatcgtggctgtcctccaggagtggcgcctggcccgctcgctgctctctcacttcatggtacttggggaggggcagagagcaccctacagagacaacactggcttcgggacgcacccacagccacccaggaaaagccttgagagcacaatgagatggagaccacagcccccaggagagaagacaaaacttgagatctggctctgactgaattgactgccgccaaaacaatgaacagaaatcaacattttccagcagattttaacaagaatctacactacatagtattcaagatgtccacaatacaattcaaaattacttgacgggccgagcgtggtggctcacgcctgtaatcccagcactttgggaggccaaggcaggcagatgatgaggtcaggagttcaagaccagcctggccaacatggtgaaaccctgtctctactaaaaatacaaaaattagccaggtgtggtggcgagtgcctgtaatcccagctactcgggaggttgaggcaggagaatcgcttgaacctgggaggcggaggttgcagtgagctgagatcctgccactgccctccagcctgggcgacagagcaagactccgtctcggaaaaaaaaaaaaattacttgacatacaaagagccacaaaattctcaagagagagagagtcaacagatgctctaggtgctggaattaggtcaagactggacagcacctgtcacaactgtgctccacatggtaaaagaaaccacgagtgaagcagatggaaggacagaaattctcagtaggtaaatggaaactacaaaaaagaactaaatagaaatttcagaactcaaagatatgatacctgagaaattgtttttttttaatggacagacctaatagcagaatgtcagtgacagaggaaagaatctgtgaacttatacatggatcagtagaaaatttccaatctagacaatagaaagaaaagtaagactgaaggccgggcacggtggctcatgcctgtaatcccagcactttgggaggccgaggtgggtggatcaccggaggtcatgagttcgagaccagcctggccaacatggtgaaaccctgtctctactaaaaatacaaaaattagctgggcatgatggcgggtgccttaatcccagctactcgggaggctgaggtgggagaatcacttgaacctgggaggcgaaggttgcagtgagctgagatcacgccattgcactccagcctaggtggcaaagcaagactccatctcaaaaaaaaaaaaaagaaaagaaaaagaagactgaaaaaaatgagcagagtccagggacctgtggaatgatatcaaaaggtctaacattcacgtccttagaggcccagaggagagaagaaaatggtgcagaaaaatatttgaagaaataaaagcagaaaacttcccaaatttgggggaacatatcaatttacagttttaatgagctcagcaaatcccaaacagactagactcaaataaaaccatgcctacacacattaaaaactgctaaaacataaaaacaaagagaaaaatcttgaatgtagccagagaaaaatgatagcttacacacacagagggagcaggaattcaaatgacccaggatttctcatcaaaaccacagaggccagcaaatacactgtggaggcttgaacgcatgcagctaagtgaaaacagccagcctgggaaaggccacacaactatacaactccagctatacaactctcgggaacaggcaaaaccatggagacgggaaaaaggtcagtggctgccaggggttgggaggagggagggatgaattggcagagtgtggaggatttttagggcagtgaaactattccgtatgatgttataatgatgtcattatacatgtcattatatatttgccccaagcccagaatgtacaacacacagagtgatccctgttgtaaaagatggacgtaggtagtaacaatgtatggatactggctcatcagctgtgacccatgtcccatggcatggctgtgctcataacagggaaggaagctgtggacagtgtgggggaggcgggtgcgggaattctctgtacttcctgctcagtttttctgcaaacctaaatctacttcttaaaactctactaactaaacagaaattaggtgcaaaataagcagagaacttttattttgttttgttttttgagatagggtcttgctctgtcgcctaggctggagtgtagtggcgtcatctcagctcaccgcaacctctgcatcccaggttcaagcgattctcctggctcagccttcggaatagctgggattataggtgtgagccaccacacctggctaattgttgtatttttagtagagatgggttctcaccatgtcggccaggctggtctcaaactcctgacctcaagtgatccacccgcctcagcctcccaaagttctgggattacaggcataagccactgcaccccactagcatagaaatttttaaaacaaacaaacaaaaaaaactgcttaaacaaaacagggaggccagaagacgatggaacaatacctttttttttctttttttttttaaattatactttaagttctagggtacttgtgcagaacatgcaggtttgctacgtatgtacacatgcgccatgctggtgtgctgcacgaagaatgaaaggagaagaagtcaccacagaatcctacatccagtggagacagccttcaggaatagaagcaaaataaagacattctcaagtaaaggaactagaagagaattgtcaccagcaagggaaaagaccccagggggaaacacagcacttctagaatgaagaaagagaaacagaaatagcggatacctgggtaaatagtttttaaactattttttcttttaagtcctttaaaatatgtatgactattgaaagcaaaaaatataccatcatcttggccaggtgtggtggctcatgcctgtaatcccagcactttgggaggctgaggcgggcagatcacttgagctcaggagttcgagaccagcctggccaacatggtgagaccccctctctactaaaattacaaaaattagctgggcgtcgtgacgcgtgcctgtaatcccagctactcaggaggctgaggcaggagaatcgcttgaacccgggaggcagaggttgcagtgagccgagagtgtgccattgcactccagcctgggtgacagagcaagactctgtctaaaaaaaaatacacacacagacacatacacacacacacacagacacacacacacacacacacacacaccccatcatctggtgagatttttaatgtttgcagacatgatacatgacaactcacaggcagggtctaagtgcttccagcgcttccacacttcactcgaagtcacaaagcaggatctgcagaaactgtgaaaggctaggtttagtatattgtaatctctaagcaatcacttagaaaagatatacagtaaaataaaactgaaaagagatttagccaaaaaagacaacagatacattaaaatggaaaatggtaaaatattaaaataagaaaagggagcagaagggacaatcaaaaccaaccgtaaggccagacctcaatgttacagttcacaacaatagcacatatgcatcataaccatcccaggacagaccacagtcgcgtatcaagagcggcaggacataagccaccaggagcaggaggaaggcagagaagccatggtgaagacatgaagagacagccaccttcacccctaaccctgtacctgtggggtcaagcatgacatctgagcctctgtccctggactagggtaaacaaggggatctctgggcccaggaaggctgggggcaggggctgtgaggagctgaggggcctgcaggccacgctgccctggcaccccatctggcacctctaggtgggttccctctcactcccggtcagggagcagcatctgacaaaacactctgctgcaggcctcggtctccccctctgctgaacgtcaggcgggtgctgtctggggcctccagatgctccaaggggaagacacggcgctggaaggctctgggcggtggagggctgtacaggaggggccatgggcctcctggaactcccctgggaatgctagaagggggcagagacagctcagatgaagccctgagagattccaatggcatcccaggcccctctcccatctctctccctcccccatcatcactgcctctgaggccagggtaccccaggctctccaaccccacatatggaggcgggcaggctcagcttctgtccagcaccagagcagttggagaatgaagtggaacccaaacgtggctccgtcccccagggagacaaacctgcagacaccctcctgagactgggacagggggacggggaagcctggcccagacagaagcacgaattggtggcgtgggcctggtgttgagaacagggtccaacatcacaaccccgctcgggaggccagcgtccggggcctctgccagctctgtcccagacggaatttgttctcactctggacacccccaggggacccctgtgctcacaggcagatccagggggcaggaggggggccttcccatgccaagtgcagttggatgatgaacgacacccccaaaagatttgtccaggtcctaacccgaggaactggagaatgggacctgatttagaaaaggggtctttgcagatagatgggattaagttaaggattttgagatgaaagcctcctggatgagggtggacttgagatccaaggacacgttctgagaagggggaaaggtgcagagacacagtcacgtgagacggaggcagagaactggagcgatgcggacacaagccaaggactgcctgggccaccggaagctaggagcggcaggaagggttttctcctggagccttcagcaggaggtggccctgccgacaccttgattttgaagtctggccccaggactcagagagtccacttctgctgcatgaggccccccgcatgcagtatcctgtcatggcagcccctgcctcatgcggcctggatctcatgaggggtccactcccctcgtctccccggtggggcgcggcatcttcatgctgccctctaaggacaagcgcatgagaggccagcctcccccaccagcaggacagaatgcacgaggcctttaccaggccacactggcgcctggcgtggctaggacagcagtgctgctgccccgctgtggggccgaaagaagccagggatgagggtgcgggcgcatctgtgggtcccggaggctccagacccccaggccaactgcacagcctgcaggcagcactgcctggccagccctgtcatccctctgtccgtacatctaaccactttctctctggggccgccccgcccagagtccctttcctgccggaggctggggctttcctggcagctactcaccactctcccggtgtttgttcatcgaggtttcccgctgctgacggttgttttgacttgctcagagttgtcatgcacctttgccctggctatgtaaggagaaggagcctttatgcaatccaggaagcccgcgtcaggcccaggaggtgcgccagctctctaggatgctggccaaggtcccccgcacttggccggatccaggcagggagtgacggacctgctggcatcctcctgaccccggtttccagctctcccctccccctgtcgacaacccagggtcagaggacaggcagccacctggccaaggggcaggcccccttgtgccctggatggtgatggcctctggggccagaaagaacaaggtggtgaggggaccatggaagacggcctggactttagtgagggtggatggcttgctgggcgggttcctcaggggcagaggctgggacaggattcagggttacatggcatgtgacccctggccaccccaggagaagagagggaaggagcaggggtcaggacaaaggggcaggtgccccctgggggactcagggggcaggcacccatggggtactggggaggctgcagagacacctgcagagttgcccccgccggcaggagacacttggctacttatcccccacctgccgtcagtcgctgtcaaggggctcccagggaccctgactgcccagcatgtctggcctggctggagggagtccccaggtagcgctgagccattgtacaggctggagggacgaggctgttactggcgcccaggcttggggccatgctgcagcagcctgggagaggcagagagagagagacaccgggccttccccatggcagagccggccactagctgagcctggctgagaggcggtaagggggctgggcctggccctggagcgagctctacgagggggtctggggctcacagacaggccagcaccatgcctccaagagtcagagaagtgaggcatcagacaggctgtggcccagtcccacagaagaggtgccgtcttgagcctccagtgtgctctgcacggcctggaggcccggacacgttttgggtggagggtgggggtctcagcctgggccaggctccccatctcacccctaagagtggcatcggcccagggtccggccaggccctactgatgtgttctcaggggccaggacatcagtgcaacagggcagccgcttgcgacaggacccggccgactgtccccgtccccagagcacttttggctgcatctgggagccgcatcccctgtttgttctctggaaccaggaagccagggctttccacttcctggctgctgcagaggccatgctctttttactctccaaataggaaagctcctgcaagcctcctgccaagtgagtgtggagagctgatctcagtgtggctgaggttaatggacaggaagtgccattacctaaatgggccaataagctgatgagaagcccgagaagaaagcctttccaggccttgacccagagagccggcaggaaagcggcaggcgtcgcggccccagcagggaagaccagctcctgagctcgagccccagctccatctgcagcctggcctcaccgcagtgccctcggacctctgctcacccttctctggcctcctctggcctcctcagggctcctgcacacacacctgtgggtctacaaggggcaaaaaagatcccggaacatcggagcaagagccccccacccgaccccgtgtgcaagcccccatttacgtgttgcactcccaggggcccctgaagccctccctctcggcctcaaaattcccattgcagacatggtccagcaaggccagctgtctggctttccggccgacgatcaaaacagcaagtcggaatgatgatgggctgatggacgcgggccaccgacaaccaggtgaccactgagagcaaggaagaagccacacagatgcaaggcccccaaagtgggaaaccccgtggcaggggccaggggcacctaaataacagacgtcccacggtgtcacctgggcccggtacaggatggcggctagcaaggccgtgtcaccaggaggctgagtcacggggaggctgcgccactgggaggctgcgcagactgttgaagggggcacaggaacgtggaattggtgttggaccaaatgaaactgccaacacctgccctcaaaactggggagttcccagtggctgaaccgaggatttccacaatggggggcactgttctaaaaagagaaggttgagggcctagaccgttgagttgtaatcattcacaaaaccttttccatggaattctgcagctggcctgggaaggctgtgcacggtggccacacggtgctgcggtgaagtctaaggggctgttcaacgtagcacctacatttggggaattacagatgccacagcctgcagggaggcacccacaactgtctcccccaaggtaaagacgactgtccttcacttacgacacaccgggttcctgcacagcgatggcctggagcatccagagaagggtccctgctctcagagccggccaggcgggctgtgtacacggccacggaaagcacccttgggggagggtgttgctgtgatttctgcacccccacttcctcacgtcctgcaacctagctagaatctgcaatcaaaagctacccagctttggaaggctgagtgggatcacttaaggccaggagtttgagtccagcctgggcaacacagcaagttcccgtctctgaaaaaaaaaaaaaaattaggcaggcgtggtggtgtgtcgctgtggtcccagctcctcaggaggctgaggtgggaggatcacttgaaccctggagttcaaggttgcagtgagccatgatcgcaccactgaaggtcagcctgggcaacagagtaagactctatcccaaacggaatttgttctcactctggacacccccaggggcaccctgtgttcacaggcagatccagggggcgggagtgagaccttgccatgcctgtctcaaaaaaaaaaaagccatcaaggatgctttgggtgtcggccgccgcaggcccccatctctctgcatctagccacatcacttggccctcagaatggagcaggaatgcgagttccaggcccaagagccacaggatggcgggagctctcacaaaatgagcgtggtcttgctagcggggcacaggctgtctccagtggacaggccactcccacacaggcatggaagtgcaggacgcgctcttcccgtggcctaaggccccttgtttctggaaggatgggtgaaagcagacactacctgtgccaactggaaagctctcacaacgagatgaaacacccgcagggccgtgccctgcctgcagcagctccggcctcgctgtgcgttttcaggggaccttgtgctgcgggtgcaactgttagggtgaccgagggagggagggacatgggcagatgggcagccagggtaccctcgggagaggcgtgtggctccgagctgccgacgcaccagcaggaacaggctccaaaggaccctcaggagcgatgacataaagaccctcccccgctgcaggcactgccaaacattctgggtgagctccagcccaaccctcccactgtttggatggggacccctgaggcccaggagtccacccaggtccccgtggtctccacggggaccaggggagccaggcttcatgcctggccacagcccttgctgggtaggggaggtgggtctgacttccaggggagcatggtgggggcagcagggcctgctcgtgggtccctgccggggccagagcgaggccactgggtggtggcgtggttcctagctcaggcccagcagcccaggcctcaacacagcccagaatctcctgcaggcctaatttctggagtctggccaggcacggtggctcacgtctgtaatcccagcactttgggaggccaaggcaggtggatccaaggtcaggagttcgagaccagcctgaccaacatggtgaaaccccatctctactaaaaatataaaaattagccgggcgtggtggtgggtgcctgtaatcccagctacttaggaggctaaggcaggagaatcgcttgaatccaggaggtggaggctgtagtgagccaagactgcaccattgcactccagcctgggtgacagagagagactctgtctcaaaataaataaataaataagtaaatttatttatttctggagtcttcatcttacaaagacgcaggggccggagctgcccctcacaaaaggcaagaatgggctgcgtgtcagagtcaggcccagaccagggacagcaaagccactggcagacaggcgaggatgaggacaaggccctgctgccggacacagtgtgttgtctgcactgaaggggggccagcgagtgcgcagatggcagcccagacagggaggagcccctagcacaggcctctcctgggctccaggcacttccagaagaggaacagttaggagaaggcaggtaaaggggtggggccagggccaggaggggcagggtgcctgctgtggctctgaagttactgcagatgccctcaggggcacagcggggtgactccaccttccacagtgactctgcaagatggacgcccctgccctatttctcaggcgggaaatgggttccagcagtatccagaccacacccttggaagggcagaaccaggagcccccgtgccggggggcttcatagccacggcctctcactgccctaccagcagggtcactgccccatcaccaggagcctctcaaggggtgtccccacgcacacagcagaaaatcccaaggactggcaactgcttgagcctcccgaagtcctgggattacaggcgtgagccaccacgtccggccctgccagggctttcggttgccgtgtgtgcacgtctctgtgtgtgcacatgcatgcacaggtgttaaatctcaggccggggatggtggctcacacctgtaatcccagcactttgggaggccaaggttggcggatcacttgaggccaagagttcgagaccatctgaccaacatggcgaaaccccatctctactgaaaatatgaaaatcagctgggcatggtggcacgcacctgtagtagtcccagatactcaggagactgaggcacaagaattgcttaaacctgggaggtggaggttgcagtgagcggaaatggtgccactgcactccagcctgggcaacagggcgagactttgtttaaaaaaaaaaaagaaagaaattgtcatctctgtctctctgttttgcattctggtcaaattccgtatttctctcttctatttcactaattctcttttcaactgtgtacttcatcctatcccatcttctgagccttttgtctcggtgactgtatttttcatttccaggatgtgccattttcataactatctgttcttgtcttgaatctgccattcagtttttgtaatgtatttactttaatggctgtggtcctttttcttatctctttggtagattaagtctttattagattcctccataaactttactccatctggaatgaattcatgttctgggtatgaattttgttggttgtttcttttttaatttcaatgaaattaggataacgtaaagttagcaatttaaaagtgtgcaatttagtggcatttaatacactcaggatgttgtgtacccataactgtttcttaacatgcaaaatcccgtgcttctgaattggggcttgcagactcatttttaaaagtttagtcattggatcaggatatgggaaatcaattctctgaaagtcagttcacaaaatgaccttgattggtcagtttgctgaaaatcaattctctaaacgatacattttccaagacttcagacagaaactttaaaccttgtctgggcagttggccgcagccatttggcaacacaggcaggagcaggggctgaaaattccagcaaaatacgtgagccagggttaagggcacattcagaagaaaagacattcagtcgagctggaccaatgcatatcaggaaaagtggccgccataaaacagcgagaagcctttggaggccatttttttattcactaactagatcactccgtgaagtcggctcgggtccacccaggtctaggcaaacagagttgtagcaaattgatctaattctgaagacaaagtggcaagtagacgtcgagggcacggtggagtcctggctttccacaaaattctgctagctgtgtgacctcaggcaagtcgctgagcctctctgtacctcagtttgcccctcagggttcctgtaaggattaaatgaggtcgcctaggtgttggcggaggttagtaacctcctggtgggagagctctccaggctgtccagggcctgcaccatcagccctcagggcccttcctgctgccctcacaagctgatgccactctgggccctgggtttcaggagaaaatgacctctgtagaagctccccctgcccagccctggggaggaggcaagccaggggagctctcgcgaaagcccccaggagcacagctctcctcccttccttctccctgatcggtggacctatgcagggacatgacagcagcgtgtcacccaccctggccaccactccctcctggcagccccagactgacagtctctgcctttccttctttctagtggcagcgtctctaaagcagcttctctttcgcctgtttccgacctgaccccatcaccggctgcccgaggccaccctgcaatcagccatataggcattcccaaagcccagtgaacccctgatagtacggtgtccgccaggaatgaggtgggcactggaaatccatgcatgataggaaccagaagagggttggcccttcaccctccccaccttctggcccccagactggtagcttgcccccggggcctcctctgggctagggtctgcccaccaatgcttgctcctgtgacaggcaacagcaactccagatgtcccatcacagctgcccaccggacacagatatggggacaccaagtgcgcagggggcaaagtcatctgcgttgtgctcagctgccgccgccacacaacagcaccagaagagctcccgccgggtgtgctcacaccacacgctctcactgcacacatgctgggttggtgccccgtccgctgaagggacatgccaccgagcatgccgggtgccaccgagctgctggcatgttcggtgcctgctggctgaacctcggagttgcgtggcggtggctttgcttcatcactgtctggttcaccgtgctctaagttcgggagccctgcgagcagtgatgcgtggccacgtctacagcctcgctggcctgtcacgttcccaggtcaggctctcagctccagcgggaatctcccattcccctactgtcttagtccattctggctgctatagcaaaatcccacaggcgggcggcttctcagcagcagaaacctatttctcacagtcctgcaggctggaagtcccagaccaggtgcccgcgtggccgggctctggcgagggcccacctgcggcttgcccatgagcgtcttctcactgtgtcctcacacgtggaaggagcaagggatctctccttcctaagggcactcatcccagcatgagggctctgtccttcaggcctaatcacctcccaaaggccccacctcctaatgccactgctttgggggtgaggatttccacctgagttttgggggaacatgagcgtccagccctcagcagctgttactgtgacccgcaaacctgccgcccccctgctcttgcccagcgatccacaggcaccccagcccttcccatagcagggacaggaaaggattcagatcccacgaggaaagcccagttcacacatccagctcagccctgcatgtcccacgtcctgctgggagctagtggtgttcatcataactcagccccaaggcagccagcagcacaggtgccaccaacatacagggaaatctgcatcacttggtgcctgtctggtgttcagtttctaggtggctggttctacccctgccatgcacgggttcccacccccgcagctgcctcttctatccccatgatcaggggtggccaggccccccctccccttcttggtggagccagcacttcctgcaggttctggacaactggctgagactggcctgggtgctcagggtgccaggactgctcaggccacgccacacccaggctgggagctgcagccgccacaacagcacctcccagctgccctctgctgctgcagccaacatcacaatgtcatgtcacagcaggtgacacaaaccccacacaggcacagtccacgcagccccagtcccatctcatctctccttctctgtccctgctcccagcctattcagcctgaaaacccaccccctccctggcagagtcagctggccccgggcccactagggggaccagcactgatgctgcacactgccaagtcacccagcagacatgagggcaggagagcaggctgggcaggaccacccactgacctgtccccctgcctcctggggcttccacgtccccacctatgcatgggatctgcgggggctgcacccacaggctcgctgtgagcaggatgagctccatgcgtggtgaggggtctccacatgttcctgttattgcggatacagtgacaagccctgaatttcaagcgctcccatccagcaggagcggggcagagagtgggggctggggcttccatgaggggccgtctcaccaagccctaggctcgggcaccagaatcacactctgtactgggctccctgttttgaggcactccagggcttcccagggcccttccaggtgccctcctgccaagggtccaggggtctcaggttccctgcgcttgcctgtctgggaagaagctgagctgatggaccccgcaccccacaataccactgtcctggggctttaacacttaagagaccagcactctccccaccgttttactttctgaacctttcaaacacatggcaatttatttagccagttgtgcagtgaagacccatgcactcccagacactcccatgcacagcgcactacacttgcctagcccaggtccatccacccatcttacttctgatgcatttcaaagtaagttattgcagcatttctcacagaaaaaaacaaatctaaagatccatcactaggcaagactagtgaataaaccacagcatatccatacaagggaatattatgttccatttaagagtgaggtatggggctgggggtggtggctcacgcctgtaatcccagcactttgggaggctgaggtgggtggatcacctgaggtcaggagttcaagacaagcctggccaacagggcgaaatcctgtctctactaaaaatacaaacactggacaggcatggtggcatgtgcctgtagtcccagctactcaggaggctgaggcaggagaatcgcctgaaccaggaaggcagaggttgcagtgagccaaaatggcaccactgcactccagcctgagtgacagagcaaggctccaactcaaaaaaaaaaaaaaaaaaaaaaagtgaggtacgttcccaagatacatggtcaagtgaatatggaaaagtacagaaccgtgaacagacaaagctaccatctgtgcaaacatctacacaaagatcctgcctaagccgcagaaagtggaggcggcaatccctggggccggcctcggccaggaggggtccaggtcctcccacaaataacccaacctcccgtccttcagaggcacagcccttggaggtgcctggtggaactgagcatggctgctctccgtgggaaccgctcagcaactcagctgcacagactcctttcttcccacctctccatcccactgctccctcctgtcccctcgggcttcctgggtcacctccaggtaatccacctgcacccaagcccctgcctcggctctgccttcaggggaacccaaaccaagacacatctcttttacatcaaatgcagtgtgtttttctgctgatagacatggaaaggccctcaggggaaacacaagaatctggcgacaatgaccgcctttggagagacaccagtaggagacaccagtaggacgtttactactcactcttcctttagttgcttctgtgccttctgaaacttgttccctgggcatatctaacttactcaaaaacttactctttcataaaagacatcaactcctagacgtctgcgcgagagaagcggaaacacaagtgccgtgacgtgttcagccacttgattcccaatagccacaacgtgggcaccccagcatccatcagctgctgggcagatgcacaggacacgcatacgatgaaacctgttcggccatggaaaggagggaggctctgactcacgccacagcacagacaagcctcaggacatgctgctcagtgagaggccacatcctgtgactctgctgctgggaaatattcagagcaggcgcatccacagggacaggagctatgccagggctgccagggcctgggacaggaacgggatgagccgtgaaggggcacacagggtctatctggaaggatgcaatgttccgacggtggatcgtgctggtggctgcatgatgcagtgacaactgctgaatcgtacacctgagacttgggtagcatgcaaactccacctcagtaaagttttttaaaaacaacaacaaaaaggtgactgacacctcagaacctccaagtgggggcagcggcgggcactgcctgctcctgctggcgggaactgggtgggctgagcccccgcaggcagtcctcccgggaaggcctggctgccaatgcctggacacagctatctgggtgaccgggctccacgacatttgcataggatgcagcagggtagccacagcacgcccctttctcaatctcatttctgcaactcaaataagaaaatcttaaacaaataaaccaacaaaaggagtgacacacggagctcctggccggggtgcagggctgtcttgagcccccaaggatctctgtgcagacaggctcttggcccacaccactgcccaatcctccttctgatgggctgtgacccagggacacttctgtaggcatcgtcctgcacgggtggaatgggagggctgaggccaggccaggcagcgtcctgtacactcaggaagaccccatgacttcgcagggggtggcaaggacccaggaaatgtccatcccccattttatccacaacaacactgaggagccctcaggtcctggcttttacacccctcccccacgggcccattgccccctgtggtaggtaggccattcttgcattgctataaagaaacaaactgagactgggtaatttataaagaaaaggggtttgattggctcaggttctgtaggctacacaggaagcatggcactggcatctgcttggcttccggtgaggcctcaggaagctttcaatcatgtcggaaggcacaggaggagcccatgtgtcgcacagcaagagcgggagggcaggtggcaggtggaagatgccacagactgtttcccagctctctcgagagctcactgactatcacaaggacagcaccaagccaggagccacccctatgatccagctcctcccaccaggccccacctccagcactggggactacatccccacatgagaccagagcgggacatccaagctatattgccctcttcaacagggaggagcagaggctgcacactgtgtgctgctcagagcagccagagaccaacagcaaacgaaaaggagaaacaccaacaccaaacgaaaagaaggagaaacaccaacaccaaacgaaaagaaggagaaacaccaacagcaaacaaaaaggagaaacaccaacaccaaacgaaaagaaggagaaacaccaacaccaaacgaaaagaaggagaaacaccaacaccaaacgaaaagaaggagaaacaccaacaccaaacgaaaagaaggagaaacagagccagcacaaggcgggaccaaccctgggcgtgttcaacagagccctgcagctctataatgttttagttattaaagtgaatgtggccaggcatggtggctcacacctgttatcccagcacttcgggaggtcacggcgggcagatcacctgaggtcaggagttcaagaccagcctggccaacatggcgaaacccgatctttactaaaaaaaatatataaaaattagctgggcgtggtggtgcatgcctataatcccagctactctagaggctgaggcaggagaatcgcttgaacctggcaggtgcaggttgcagtgagccgagatcgcgccattgcactccagtctgggtgagagtgaatgagactctgtctcaaaaataaaaataaaaaataaaaaataataaagttaatgtaagaataaggggaactttgaaaaagcagttttcttatcatttaaggcttattggtgtaactacatctccttaaaccattaaaaccataatcaatgatttagggtgagtgattcttccaaacaccttaaacttcttgaaagcaaacaaaacacacaaacatataaactgggttccacacaatcagggtttgcgtcatctatttgtttctctgcttgtgtaaaccaccctagcttataacactgcctgttttgaagacttcttggagtttaagtaatattacgttcatactttgctggggttacagaagacctttgtgacccaaaggaaaaatgttaccttttcagcctaatggtgattatgggatgaataatccacctattggctgatttttaacttaaaaaaatgttttcgagacaggctctcactctgtcacccaggctggagcgcagtggcaccatcctggctcactgcaacttcaaactcctggactcaagcagtcttcccacctcagcctcttgagtagctgaaactgcaggcatgtgctaccacacctggccaattttttcttcatagagatagggtcttgctctattgcccaggctggtcgcaaactcctggcctccagtgatcctcccatctcagtctctcaaagtgctggattacaggcatgagccacagggcccggccaatttttgactttttattaggaaattgccaaatatataccaacggaaagcaaagtatactaaacaccctgtacctgtcagccctgcagccctcatcacagtggctggtgaccagtggcctctcatctgtaccccatggcaccctgagccccgtccccacgcgagcaccactggcgtattttgaagtaaatctctccttgcaccaccaacagtgcagcagaatctctaaatgacagctctttctaaaaaataatcacgatcccattatcacaccccaaaataagtaattccttcataccaccaaagttcccaactgcctcatcaatgcttttggtagcctctgtctgtttggttagtttatgacaatcagggtccaggcaaggtctgcgtgctgtgtttggcggctagagctcatctaccttttttttaatcaacagacaagattccttctctttttcctttcattgatttgttgaggacaggacaccaggttgttgccgggtctcatggcctgtgtgtggctgggtgcagttcagcacattcccctctgtgcctggtacaccagtgcgtagaaccagaggctggcctcattcaggctggtcccagtggggccgtgtgattcccagcacgtcccatccgaaggcgcacggcgtctggttgtccctgtccttctgattagatcgattggggtccatctatggccagcctgcctcacaccgtgaaggcccccgacagcctgtcgcctcctaatttctgcagccattgaggaccaatgcccacatctgagatttcactggaagttgcaaaatggcaatattttaattcattcttcatttattagctaactttttttttttttctttttgagacggagtctctctctgtcgcccaggctggagtgcagtggtgtgatctcggctcactgcaagctccacctcccgggttcacgccattctcctgcctcagcctcccgagtagctgggactacaggcacccgccaccacgcccggctaattttttgtattttgagtagagacggggtttcactgtgttagccagaatggtctcaatctcctgaccttgtgatccacccacctcggcctcccaaagtgctgggattacaggcatgagccaccacgcccggcctattagctaaccgtctatgaagaactttccatcatcaactctttgtttgccaggacaagcaggatacatacttgattctgtccctttatgagttttcagaataaggtgatcccccacctttttcaaggtgaaggagttattaatcaccttttaaaaaatacccatgacggcaagcagcggtgcaggccatgcagcataaggcaaggtggcctgggtgtgcagaggccacagccacggagggagtccagggaggaaaccgcgccatggagacctcaatgaagccagggcctgagcctggcaggaaaggggacgtcacgtaccaaggtcccgaggcaggggggacctgaagatggacgtgtggtacaggttacctggcacagcaagggaggtggctggagcctgagggacggccacacgggcagagaagacactcggggctctcgtctcggctcccattctgcctgcgctggagctgcagctgctgcccggggcacggagaattcgagggagaggctttccaggcaagtccaggggagtgagagacacagaagttaagggtcccttgaatggtgattaacatgacagccatgcaacctgaacagagaagagggaagggagggccagggcaacagcaccccagggccatgggaagccagcaggcgttgtggctgagctggggagaacaaacaccgtgaaggggccactgaggggcccagccaaggcagccaggctggctggacagttcgggagggcctcatgggcagctctgaggcaggggcgatgcgtggcggcagcttcacggtccctgaggggcagtgccatctccccaaggctgcgagccagggcttccctgtgccccccactgttgccccttctatgcccctagcccttctgatgagtcagctggtgccaggtaggaggggggataatttacaaccaacatttgcattttaacaggaacgtccttgagacaatttcctaaagcaaaagagcgactgtggtgttatcagtagccaccatgtaggcgtcagctccttagtccaactgccagcccctgagccactgttttcccctttcgtggaagaggaaactgaggctgaaggttgagcagcatgccaagattccacgagagggcagccggagcccagccaccctcctccagtggctgccacaccctgggggacctcaccaatccctgccactacccctacccactgcagcctagcccttgggtggcaagagagggcagggtcagcagcatagctggataaaccgaccatcagcagagaccctgggacccctcagccatcgcctgagggaggctcctccggatgggaccagctggcctagtggctctggccagggctgcagggaacaggatgctccctctcagaagccgactcagctctgccacgcggctcagctctgccatgtgactcagctctgctacgtggctcagctctgccacagggcacaggatggaatgccccaagatgccgcaatgctcctcctggtcctccagttacgcggcctccccttggatgtttctaacagtatacgtgtgcttgtttctggggctcccccgagtgggagcctgggaaggaccagccgtccacagggccctcggtctctgccccagccggtggtaaagtgtggctgcggctgtgctaccacctccaggtgaggggccagccacaggtggtcttttgtgtgatgggctgtctagggaggccctgctgcccatgggtgccatcgatttgcagtgcaggggcccatatgaccctggaggaaggacgtcctgtgagccttgagcctgtgcagcagcccagatcagaaccacacactggaaacccccttcagctaaggtggtctctcccccaacacaatccccctgaccaagacttcctgacgtcctgagggtgcgtctgccttccaaggcgaacatctcacaccaactctgcagccagcaagtttgcgttagaagctggaagcctgctgttgggggagcagaccaggactcctcacaccccaagagtggctgctagacactccctagcatgccccgtgcctgtctgaccccatgaagcctgaccctgatcgccgagtgtggctgactttctgagcccctaaggaaaaactccagagtgacccttaaactttgtaaagggcaaagaggcctgtgggcggagacgggggaggggtttctgctgggtcctgcctgaacaggtctgaggccaaaggatccctagggccgtcctgggtcagagtgagggggggcacacaagccctcaggacccaccaggcgagtccagggaaggcccatgaaggtggccaccgtgagccttgtggtccacagggccaggctggcacatgctgtgttctcacccagaaaggccgttccagctccttctggactcctcctcctcctccccagtgttctctgtctctctgcccaccccgctctctgtctccctcacacacagagtatagaattgtggggagatgactctgtatttcctcatcgtgcatttatcacagtgactcatccatctgtggctgctgggtgactggcagggtttgcgttgagcttccgagtgaggttgattcggaagaggaaggcatgactgcctggctattagcagaatgtccggcgtgggcagtgccacccagctgtcgacactgacacccaggcaaccctgacaggtggccacagggggatgtgtgtgtacgcagagtttctcaggactcaaccttcttaaaaaggaggtttgcagtgaagagcacaggggtacccatcgggagaggacggaaatgcttccatcaacccactgggtttggggaacaaagcagaagtgtgttagggcaggtgtcagaccacctgcgaaccctgggctgctggaggcctggcctcttgcacgagcctctatccactcagattcacggcaggatctgcccccgacaaaggacttcacctggaccgagctcctgggccccaagcagctgacatttgattctcgcaacaactgtgcagtaagtgtggttacagcccccactccgtgcccagaaagttccaccatctgaccaggcaggcgcagagacccatggcggggcagggcagaaccccccgcccgtgaacatctcccgccccagcttccctttgcggggcgccgcagcactcctgggttctccccctccgcggggcgccacagcactcctgggttctccctccaaaggggaagaatgatggagacggcgagaatctgcatgtgcccgtggctggcaactgcttgtgagaaggagaccaaagtcatcggctcatatcaggacttccacctggcctctcccggaggccacctcgcttggacaaactcaagtttccaactgaactaggagaagagcagatgcttgcttgaaagagggatctgtcccaggcagactggcccacatttcagtggcagggcagcagcccttcctgagattctctctgaaatgattttttgactaggatgtggagaagacacacagaaagagaggtctttccgaagcagtgaaattttacaacaattcaaagctgctaccacttgctttggctgggatccagctactgaaatccagagacatctatgaaaacacccctaatgtgaacctgctgcccgaactccagctcactcccttgtcctgtggagcacggactcccaggagtggtgctctatagccccagagagcacccaggccagccagctgatttcacccatctctctctcaaacacacgtgcacacacacacacacacacacacacgcacacagcactcccctgccacacactatcactcacacatgctgacacacaaaggcatccaaattggaaaagaagtaaaatcctctgtttgtacaccgaaaactaaagattacacacacacacacatctgctaaaactaataaatgaattcagcaaagttgcagcatacaaactcaacctgcaaaaatcaagctcatttctatacgctaacaaatggcaacccaagaacaaatgaagaaagcaagtccatttgtagcatcaaagtgaatgacacacttagaaattaaacaaggaggtgaacgatttctacaataaaaactacaaaatgttgctgaaagacattaaaaaagacattaaaagacatcccatgttcatgaattggaaaacctaatattgagatgttaatactactcaaagcaatctatagattcaacgcaataactacctacctaaatccaacagcactttttaaagaaattttaaaatccattctacaattcatatggaattgcaagggactctgaatagtcaagacaatctttttttatttaaaaaacttttttccatctttttttagagacagggccttgctctgtcacccagtctgaagtgtaatggcatgatcatagctcgctgtagcctcgaccttctgggctcaattgatcctcctgcctcagcttcctgagtagtgcgatctcagctcactgcaacctccgcctcccaggctcaagcaattctcctacctgagcctcccaagtagctgggactacaggtgcacaccaccacatccagctagacggggtttcaccatgttggtcaggatggtcttgatctcttgacctcgtgatctgcccacctctgcctcccaaagtgctgggattacaggtgtgagccactgtgactggccaatttttttaaaattgtttattgtagaaacaaggtctctatgttgcccaagctgctctcaaactcctggcctcaagcaatgttcccacctcagcctcccaaagccctgggatgacaggagtgagccaccacgcccggcaatcaaggcaatctggaaagaataaagttggaagactcacactttcatatttcaaaacttactacaaagctacagtaatcaatggagtgtgatacaggcatgaagacagacatatggaccagtggaatacaacagtccagaaataaaccctggcatgtatggccagatgatttttgatgagagtatgaacaccatttaatggggaaaggacagtccttccatcaaatagtgctgggaaaattggaaatccagttaaattttttaaaaaagtgaagttggatctttaccttacaccgtatacaaaaattaactcagccaggcatggtggctcacacttgtaatcctaacactttgggaggctgaggtgggaggatcacttgaggccaggaatttgagaccagcttgggcaacatagtaagaccccatctctgtctgtagtcctaggtactcacctgaacacatgtggtccatccacaaaatgggatattactccgtttttaaaagtagggaaattctgacacatgctacaacatggatgagccttaaggtttaagatggtaacatttttttttttttgagatggagtcttgttctgccgcccaggcttgagtgcagtggcacgatctcagttcactgcaacctccacctcctaggttcaagcgattctcctgcctcagccccctaagtagccaggactacatgtagccatcaacacgcccaattaattttttgtatatttagtagagatggggtttcatcatcttgcccagtctggtgtcaaactcttgacctcaagtcatccgcccgccttggcctcccaaagtgctgggaatacaggcatgagccaccgcacccagccacaatggtaaaatttgtattgtgtattttacagtaataaatatgccaaaggctaaaaaaaataaaggtacagtggccagaggaagaagggcccaacctggaattggagcagagctgtgggtgggtgaagaccccgtggtaggcaatgcattttagctgatggggtgcagtagtgtgtgccgggcaaagcggacagttccagctcccacatccaggctgcagggccttcatccacccagctgggaatgcctgctcactctgcaggaatgtgcagctgctactcaccccgtcttgtgaccaccagcaaatggtttgttggtgttaagctgtggcctcagccacctcaacagggccctgtctggccatggagacgttccccaagttccagtcattgtcagctgctgggacactgcggtactgaatcagcccgttggagtcatccaagtgtgaaaaggtacctgaatgagggcagcctggggacaggagagctttctggaacatggggcaggaaggtagcctggacttctgagacacagccactggccctggccctggccctggcccagtgcccgggagcagcctagcctcctcctcccaacacccctgctcccaggcgccaggacaaggggccagaggagacccagatggcccagatccaatccttccatggtcccctgggtggggccagtgcagggacctcccggaagccactgctgtctccatcgccacccagactcaggccagtctgagaacccaggattaggaagtcatctctgagatgatcgggttaacactttcacgtggtgggttaacatctgctgttataaacttcaccgtaaacacacactgtgccttaagacgttagctaatgagaatacaacaaacacataattttaaatgtacacacacacacacaaatagctgggtgtgcaaacattttttacactttacacaaaagaactcggtggcttctaggctggaagacgaggccctctgagtcctgttgggagcgtggggtgtgatcctgggacagaagccttcagctgaaggggtgggcaggatggaggcccttccaccaacagaaccctgaaagggacttgggacaaatggccagcctgcccgcagagggcctggaagggcaggccgggagcagaggaggctgctgtctaaatatgaggcgctattcctggcggccacatgttcacattgcccacagagcccagagggcagctccggacacagccaggcctgggggaggggcgagcctggtattatgggagagggtggtcagaatgccaccagccaggactgatgcagggtgaggacaggggaccaggcctcctcccacctgtgactctccctgtcctgcccacccacccacggaaccacaggaatgtgctagggattgcaggggatgttgtgcccactctgctaccttccatccctgtgcactgccctaccagccccctccccgcacctgctgcaggggccccgggggtgccagggcctgcccaggtcccagatccagactttcaaggtgtgcaaatcacaggatttgtcctaacaagagggagggaagcttccaatgtcatctccctgcatttctgagccaccgaggacttcagaatcacttaaaggtagtgcaattcacccccaaatcacttacttttccaaaaattggggccagctagggggtgtctgggatgcagcggaaatcacctatggggaagtcagtgctgtaacaacaatgctggcttgatcccttcctgccccccacctgctcacacaccacacactcataccacacacttataccacactcacagcacacaccacacttataccacacacgctcacaccacacatgcacactcacaccaaactcatcacagccacatcacacaccatacatgcatacacgccacactacatgcacacatatcacacacagcacacatgtataccacacgtgatcacacttataccacgctcaccccacacactccacgcaccatacatgcacacacatcacacatataccacacacacacccacacaccacattcacaccctacacagcccacacacacgctgacaccacacacaccccaaacacaccatacatgcgcagacaccacacaacatacatgcacacaccacacactgcattcacactacacacatataccacacacataccctcacaccacacacgcgcacacacactctacataccacacatgcaccccccacccctcacacacacatgcataccacctcccaccaccctacacacataacaggttattcattctgggtgacgggaatatgggggttgctcttattcactgtactttttgactttccatacttctccaaatagaaataaaagaggagggcggaagaggaggagcaaattgggagtaaaagagcaggtgctgggagcttcccgtggctcaggggtggcttctggaacgggagagagcaggtgacagcgatgaggtaggtctgcagaggagccgtgtgcaggagcagagatggaagggccagcgcgcaggcagccttcggactcggctgcccagctgggagggctgtgtctgcactgacacgggtgtcaacagcaggggcgacctagagcgagtctgtaagaaggaaggccgcgacgcctgcagggacccaggccctcccagccttagcacagcagcgctcctggccaaaaacccaagtgcctgctgctcactgtctcagaacccacttcgagtacagaaacatgtctgtgcatgcacgtgtctacacaggtgtgtttctggggtgtgaacacagtgcatgtgtacacacacacgtgtatgtgtgtgcatctgtgtgcctggttcaggatgtatgtgcacggacagcatatgcacagggaacacgcttgtgcctgagtgcgctggggtcagtggtgctggccaagtgagaatgggggtgggcatgagggtgctgggcggggccagggcaggaactcatggaactggaggcctgtcttccccctgatacattccagaggcgggagggggtggacagagtctgggggctacttcttcaccccaagcgctgccctctcagaggacccagtagaaacccacacaacacccagtctctgtctgaggggaggatggggtgggaggaccccctctaagtgcactgtgactttgggaaacacacttgttcccccttatccgcggtttcgctttccatggttcagtgtcctgaggtcaactgcagtctgaaaatattaagtaaaaaattctggaaataaacaatttataagttttttcaattgcctgccattctgaatggcgtaatgaaatcccctgccgtcctgctctgtcccaccagggacgtgtagcatcctttatccagcatctccacagtgtctatttgacctgcctgctagtcactctgtagctgtcttttttttttttttttttttttttgagacggagtcttgctctgtacccaggctggagcacagtggcacgatctcggctcactgcaacctctgcctcccaggttcaagtgattctcctgcctcagcctccagagcagctgggattacaggcgcacgccaccacacctagataattttagtatttttagtagagatggggtttcactatgttggccaggctggtctcaaactcctgacctcaagtaatctgcctgcctcagcctcctaaagtgctgggattacgggattatgggtgtgagccaccgcgcccagctgtagctgtcctgatgatcagaacaagtgttgtggtatcacagcacctgtgttcaagtaaccctcatcctagttaataacagccccaaatcagaagagcagtgatgctggcttattgttctaattgttctactattagctattgttgttagtctcttactgtgcctaatttataaattaaactttaccacacatacgcatgcagaggacaaaacatggtctatctagggttctgtctagggttcaatgctatctgcggattcaggcatccaccggggatcttggaatgcatcccctgaggataagggagggcactgcacctgggcactgtggctccaactgctgttcgtctgtcatgtagtgactgacagggctgacctcatcttaacctgcttacgtcggtaaagaccctctttctaaacaaggtcacatttacaggcactgcgggttaggaattcagtatcaaggggatacagttcgatccataagtaagtaaattcccaagtaaatatgtaacctcagattgagaagtgctctggagaaaataggggaattcaccaaggcaacctaattatgttccaaaatattcagaacacattgctattggaagaccgttctctatccttccacctggactggcctctgtccctctatcctcaaacatcccctgaggactcagcgtttcattccttgctgcccacgtacagccctggggctctttgctctgcttctggggtctcacgcggaactctgaggaacatggacggccgtcacaggaacctcagtgagccccgagcaggctggacagcaagggcaggggactgaggctcaacaaccagcccctcccccaacaggccatggcagctcagcagacactcccatgctgcctcccaaggccaaaagaggacgtgtttgcaaagggtgttgtccttccccttgcctgcagtgattcagccagctgaacgagaactcgtggtcaccttaggcagccacgctggacaaaaaaaacaacatgcaaccaaaagtcccctttgtcctcgttcacaatgcttcttgcctaaattacccacgtctgctggaagactcgggcgcatttcgtctgtaccgagagcaatcaggaagtttggggtctgtggtgctccccagcacagcaagccccagggctacaggggagtcgttagctcccaggccagggctctgtggacactgcgaagaccggtgcctgctgcaggtggagcagctgtgagacctcctggctcgtcttcccagggatgcgggctttaattttccatcctggctgccgtccccttccatgacctgcgcttatgaatggccatgtccaacaagtggcatcaccccctcccactgtctccaaggagcctgctctggggaacgctatcttgtttttctaaagagccacgtctacaagcaaagaggaaggtgtgtggtgccttccaaagtgctagctgccgggaaaggacacatccctcacacctcctttttgagctgcagaaaatgcagctcagagatgccaagtgagcatcgcactcaggaatgcgctgtgccctccgtggagtcagactttggcctcttaagcaagagcaggagaagacgagggggtgggcagcagccaggggcaggcgctggcacaaacagatgaggatctaaatccacctgctggtcacacagccctgagctggtgcctcgcccctcacagcccctgctgcaggtatataaagctgggcacgggtggacaggacgcaaagcagtgatatgtgcctccagtcagccctgaaggccagggtggcagcttcccctaagaacagagggcgcctgggtggctgccccaagagaacaaagcagtgcagacctgcagctccccctgcagtgaacagagctctctgcaaacgttctctgacagcaatgtaccgaaatctcttcctaactcaagtttacaaaaattttgttttcttctagaaatttaatagtgttagatcacatatgtgggtctacgatctgttaaggttctgtatgcagtgaaaagtatgcagttccacttttgtgccagtggatacccaattgtctctgctccattgttaaaaagacttcccttttccactgaattgtctttgaatctttgttggaaatgtgtgtctgtatctgtgggtctatttgtggactcattgtgttccactgatacactgtctatcctaatttcaacaccacactgggattatggtaggtttatggtagggaggccttcgcctctggcctggggtgttgacggaagctgctcccaggcagtggttcctggggacagtaggggcagcaggaccccgctggcccgctctgcaccttgggccgcctgcctctgcttccgcttcccgccacctttgctccacaaggtcacagcccaggagacgaggcagactcctccagatttatgtccaacacccaatctgggtttctgaagaaacttctctcggaaacgcccagcttccccggtttcctttgttcccagaaccggcagggagcagagacaagaatcatgagcctcccagcagcctgggccctgggggaacgccaccaccctgctgtgcttcacattccccagccacaaacggggacaagtctcccttcccctcctggatcctgcactctgtcctggaaccttccagagagaacaggcccagagcctgcagaacctgtgtcacccagaacccccactggctgcacgggagactcgctggggcttttgaaggcctacacagttctctggctgtggtgtgaggagtggtggaggctgcaggaggactgagggcctccgctgcggagaaaccaaggaaggaggggtgctgcctgccatgaggtggcgctcagcctgccagcgcccacatcacaggggctcccatccgcccgcctgccccggagctcgcccggcctccatctccccgtctcgggacatggtgactgcgccctcacctagttgctctgaggatagaaagcaatccaccgaagcctcatgcaggcacacagggtggacacgctcagaacataggcctggcaggcagcccctaccagagccaggcattcgttcacacgcatcagccattctgggggaggaaggaggagaggccccaactttacaagccccgtgcccgcagatgaggggaagaagtaaagatggaggctgtgggtccccatgtggcggggccctctgtactcctgccccgccgtggcggataatgggaaaccgcaaaggaacacactgtggccgtttcttcgggatggacccgcgcgtcctcactgcctttctctcgggatcctggggctcaagtgaactgatgccatccttggttcatcgtttgttcatgtaaggctcccttgtattttcatccgttcattttaataacgtgatgagcacttgtgaacctaccccactccaagaagtggacagcagagaaagcaatcaacatgcttctttctctcccattcccaccctgcctggcaacctccatctggagttttctccttctcctttttcttaaaagttttaacacatatacacacacttgctgaaaaacacacggcttgttgtgcttgtttccaagctgtatgggacggagtcacacagagtcttcgggacttgtcattttcactcagtcttaacgctatgcagcactggtgctgtcgctgtggccttcgctcaccgtggccagagctgtgtggggtttccgcgtgcagcacgccatgaagtgctccttaactctgggatggcactgggctgtgtctggcttggggctgctcccaacagaactgccctgagatgtgagcacatgctcgagcttctcctgggggtgcctgcagggaacctgctgtagaaagggcacatgatgttcaacgtcacacatagtgccaaacgggtttcccaaatattcagaccgctgctcccccagaagcactgggagagagccacatcccgctcaggctcgacaggttggacttccgaggttcggccaatctggtgggtgcacagtggtctccttaccatccaggtttgcgtgtccctggagactaatgtggttgaccatctcttcccatgtttgccagccaaatcactgagaaatgcctgccagtcacatatgtatgtttctccattgggttgtaggtcttttttcttactgattggtaggattttttatttaaatttctttcaggtggttttggtaagcatgtgttcttagctggcaaactttcagatcgtaccaaccctttcctctttggctggcactcttgggtcctgttgaagactcctcactgctgcaggtccgcggctattcgcttggtgccctgctctggggaaaggcagcccgggtctgccccactcctgccgagtgtgccggctcttccttcgcgggagaaacccttcccagaaaagcaccactggggagaggccctgcctcctgctcgtgacttaggacacaccacaagctccaagggacccatctgcgcaaatgacaaccacaaaggacacctctgtggggagtcattgatctcacaaggcagggaggggcctcaaggggtaccccaaaacaaactgagcaaatgcaagctggacccaaatggcagggttcttcagtggcccaaagtggactggggtacccagcactcaggaggccagtgtgcaccaaagcccaggctcgggaggacagagcgttgggcaggggcagagccggccagactatggtgaccacaaggccaggccggccaactggcccctcacaggcgcagtcagcaagacacacatgtggcctgtgatgacacagaccctggactggcactcgaaggtcagagccaggataggccagccctgttctcacaggcctgtggccagcaggacagtgcagcctcaaggaacaagcgaactgaaacaccaagaacagccccgtgggtgcagaagccctgggcagcatcagcgtcagaacagctgcttgcagacccaccgcccctccctccctctcagccaagtaactcagtgctgcagcatctgtacaagatagaagcacatcagtgatgccccacagccaccgcaggcccccgaggcacacagacatggccattcaaaacaacccacaagggcaggcaaggctctctccagaagaccacgactcatcccatctagacaggccagggcagaagcacaacacgccagaggcaagcacccaccaagacagcctggctccaccaccccccactccttctgcaggctgagagacggcgacaacagcaccctggcactgcaccaccctggaccactccttgctgtgccaggctaaaggacagccggtcctgccctcacagagcacgcgtggcaaggtctccactgctgagacagcagtcacctggctctttcactttaaaacgcccctgtgagactggaacaggaattaaaagaaattaaagaacgtgtaagcagaaactcagttgtaagaaaacccaattccccctgagaaagagacagagctggagtcctttaaaaattaactgcctgtttttctgtggctagtgagctttatctctccctttcccaggcattgtggagaccctgattccctagctgtgcagctgcaaggtcacagataaactcaagtcgcaaaacatgtttctccttaaaaagtaagaaatgacataatgcatgtctcaattaattaaataactgtctttgtttctcgcttgtgtaatatgcttccccctgtacagatctccccccgccccatgagatgcttaaaaggtaacttaactctttgtttgggactcagtcgtttggatgttaatccgactgggctagtgcacctaaataataaatatcctcctgtaccccatcagtttctctgattccttaaaaaatcccgctacaagacagcggccgctctgggctgtgtctttcacactgagttctctcccacccagcctgagggatcatctcccaactgctgtgagctgagccggtgctcacaagacaccttagacccttcaggcttgaggtctgtgcacagctaccttcaatgaagagcataagtcaagctgctcttcaatgaagagcagatgcctttcactgctgaattacccagagaggaattcgtggttgtgcccaggatgggaaaggcttccaggagccccaggggtgaggtgtactccatactcagtgctggaagcctggggcatcaggaggcccccactctgcccctcatccccgagttcctggtcgcagatgcagcgtcacacctgagagccagagggaggtttcagggtgtaatctagcctgtgtgaccccttgttcctgatgaacacctggaacccaggccagcagcctcccctgtgcccacggagtaggcagttgcaaatgcacatgcaggaagaaggaagtcctttctcttagatcccactctgagttattgctgtggcaaccattcctaacgctcatctccttttctccagcccgtctcagaaacacgtggtgaagctccatgatgaaacgctctgacccactctgcagggtacagcattagcgttcaggtcggcttcctgagcccaggaaatgtcctggccctggcacagcagtgggtggctggtagggccctgagctaggcagggaggcccctcctcaggcttctctgttctttcccaaccctgggaggaacacctggatggggccaccctctgtctaccccactggcctcaacagaatgaaaaccagactcatgagatgctcaaactcccaggcaaggatccccaagaacggcagagcccagcaggtgaggcctcccatgaacagcagagcccagcaggagaggccctcaggaacagcagagcccagcaggtgaagcccccagaacaaaggtgtctggcaggtgaggtcccctgaacaacagtggtgtccagcaggagaggcccccgaggaacagcgttgtctggcaggtgagacccccagggatagagatgtccggtagaagaagcctcccagggacagagatgtccggtgtccagtgtccagcaggcgaggccccccagggacagaggtgtccagcaggagagtcccccgacgagcatccttctgaatgagtgctccagaggaggcccctctggaggtaggtgggtacagtctggtggcgacatcctgcatgtgcacgcacaagagaagagcccatgcaaatccacagggcgaatgcaaagtcctgccgaggatcctctactctctgcccggcccaggggtacgtggggaaagtaggtgaggtggcttttctttcctatggaccagaccctgctgtgggtcagagctagggcctcaggacagcactccctccaggaggcaattattcttgaggagtcactcttccagggctgtcttccctagtgtcttctgtgaagcgccgttgctgctggtgagaaggaggggagaggaaagccatcttcagatgctcaagaatctgccaggtgtgagagggaccaaaactcgtctctgcagctcccgaagacatagccaggatgacaggggaagagtaagacaaaggcgttttcaactccgtgcggagaactttaaacagtgagaacgctccaagaacagacagggtgagctggaggttcctctcacctgtgagtcttagatccacagctgcacatcatactgtcccttttcagccctgtactgtcccctgggcacaagagcttgccatctgccctgcatcctcacaccagctggcatgacctccttgggacaccctgtggatgccttccttgccactgcacactgtcccctggccgacgtcactcttgacttttatacaagcctcggggagtccctgaacctctgacacctctgtttcctttacatttcctgcaaattgaaagtctggtcgggatcagtgattcccaactcatgctccacagactagaaggggctggactagggtggcccgatggtcagacgggcctgggaaatgctgggccaagcagagtaagcaggtgtctctgctgtggatttctcagagcctttaactggcacctgttgtgaatctctgagagagcaacagggcttctaggctcctctgcccctggtgccaactgatctgcaacatcaggtaacatccctgtggtgggtgagcagcaacaatctgggccggtggtactggggtaaaagaatttaccaagacagttgtaggcaaagaaaggcagatttatgagagaaagtatgaaaacgcattccaaggttgcaatgggcagaatcagcagaagaggagccaactgcaaagaaacaaaggcttgctggggattttatagggtggttcttaggctgcagagggcgacgtgcagaactaataacgccaaggcagccaggagctaacttggaggtgtctggccatagctcggcccaggaagatcatgagttacctgagcaggaggcctgcgtgtcctggaccatgaagaaagtcaactctatagcttatctgctttctctttttgcttgcccttggtcctgccagcctgactccttttccctaattaggactccacaatcccaagaagctaacattcacagacacaggctgggagacatcggctgacgcagttgatgagggtcccttacggcaccaacaccgcttgctgaggctctgctgagactcagaaggtgcccttacatggagccagagaacaaatcgaggccacagggggaaggcaggaagagctgcttcaaaagagaaacttcaggctcccatgagccttttaacagcctccctgcaaggcagccactgactgataccagccaggtgatcagtacaggagaggacggggcccaggatggggctatccatccgggagaggggggtgctttacagacttttccagaaggtccccaggggaaccttcacaattcaagggcagaaaggatgtgaggtctggtgaggttccaacagccagagaggagccaggcaggtctgttcagcttgagtgcttggcccatcagcagcttgcgttgggtcagagccttcctccctcagccccaaccccctccctgctacagccccaaaacagacaagtctgaacaggtgtgactagagggagccaacaggcagggtccttggtgggtgacacatgctcactcccgacactgactcagacagcagcagggaagggaaaccccaaaccattcaggctagctgagtcagcaggtacagtgtggcccagagcacgggctcagcccagctgactcctggtaccttggggaggcactgggaagtttcagccagggaaggaatgactgctctgatttctatttctaaaagatccaacaagccactggagagagaatgactgagggtggaaaaacagtctggtgagacagaaactgaaggaggaaaccaaatggctctgctgtttctgagtccacagggcctggacacagaaccccgctactcagtcaaactcttactctaggagttgctgggagggcatgtggtagctccgggtgacttcaagtaaaggagcttgtcctcaaacatctgggtggacctcctgtcaatagctgaaggccttgagaaccacacggaaacttccctgaggaaggagagattcctcccatggactcagtgtcagctccagcctgagagtttccagcctcccgcctgccctggatttcagacttgcctaaccagcacccccacagttgcataagccagttcctcgccatatatgatgcagccacattaagcatgaaacatctgtttagcatccaaatgtgccaaagaaaaagatttacactgatcagaatttgttggcatttgatgctggagctgagtgtgggggctgctctggagatgggtccagcccagggcagtgcccatagtgagatacccaagaaaggaggccagcgtggttggaggagacctgggagggagctggctcaggcgaaaggaggaggaagcactggtgctgggggcaggggaactttgaccccagtgtatccgagtgtcaggggaggcagggggtggcagaaggggtgctggtatccgaagggcaggagtggactgatgggggatgtgtgctgtcaatgtttcctgagatggagcagctgttcccagccacggtgcagctgcataggacagcccagaagaggcagagctgagtgacaccagggccagctttgccagataagcgcaatagtgggcaagcagtgagaacatgaagggtgttcctaacagagtggctctaacacggtgctgccatggaagttttctagggaggaagggggccagccggggtgaggcacagggggctgctgtgccaatgggcaggaccagctgtgccaggtccgggtgtggggccagcttgctgggatgtggtcttagaaccagtgagaagaaaagtagaaacatgcaggcaaggggttcccaaagggacttttcagaggggtggcaaggccaaggggctgggcggcctggaagggccaccaccaggattagttcaggttgcccagaagctagcaccaggtggctgaggccacaaagagaagctgatgaggggcgacaggggcagccagggcatttcctttctgaactgtccccactcagatgaaagcaccatgactgacacacatctgtgcacaaggcgagtagccatggagcagctcctccgagagcaggcaaggcacgagaggcacagagaaccccatttcagagaaccccatggtggcacactgggagagaaggctcctgacagaggggctctgtgaagctctctgtggagttgcaactcgcacacgcgtgcacacattcatacactcatacacgtgcacacacatgcacaaacccccacacactcacaagcctatgtgtgtgcacacacgtgcatacactcatacgtaaacgcagccacccccacccagcaccaggtacccaccctcgaactccagaggttcctgggcacaggtcctcgagcctgtccagggccccagctcccagctatgctcatcccaaatcgccctcgagactgcccagagcatgactccggctagggcccctctgggggcctccctcagcctcctccagttcacagaccctttcctgatcctcagggccagggcagatcccaaccagtgaactggagaagaggggcttgggacacaaggggataagaaacgagtgccccaaaatgctgcagtaaccattcgcctccaacttgaatggcctatcatcctaaacgtgaaaacagatgcaggtgtcaagccgatgcttagggagatactcagccctcccaaatcccaagaaaggattaggccttccaaaaaattctagtgacaactttctaggaagagcaggcctttggtgatggctggtcttgagggctgggaatggatggctgagctccaggaggaactgagctcaggtgcagcctgtccaagggcagtgggaggctccagtatgatgctagaacattctgttgccaaggagaaggtccgccctctgtataaagttcagacagtgccctccacacaggcttctgccagccctcatgaccttgcagctggcctctctgtcctccccattcttcacatccagccagtttctcccacacacggggccagggttgctcagccctttatacccggccataatgagagaaaaagcatttatgctgaggtgatttttgccaagaaagaaggcaaccatgggcttgtttctgtcattcctgctgcactaaccctgtcaaagtgtgacagccactgcttcccaggtggcaagacaagaaatgctgggttgagaagctggtccaacgaccttgaatttctggagagagaactgggaggccttgctcttctcccttttctgggctcacaaccccaacacatacaatccttcttccacaatgtggtggtgagtcatccacactgggtgaccaatggaggcctggtcattatccaaacaattaagcctcaacagaccaatttatctggccatccactgtgaaacatatctcagacgttctaaaaagataggaaagaaaagaaaaattcagcctgtaatcttagtactctgggaggccctggctaggagcttgagaccagcctaggcaacatagtgagacccccatctctacaaaaaaatattaaaattatccaggtgtgatggcacacacctgtagtgccagctacttgggaggctgaggtgggaggatcgcttgagccaagaagttcaaggcttcagtgagctatgactgtggcactgcactccagcctggaagacagagtgagaccctgtccctaaaaaagaaaaaaacaaaaaaataaggaaaagaaaaagccaaccccaacagaacaagaccaaagctaggtatcctcctgtttccccaacttccttctgggacagcctccctctagaactttctgtcctcctggaaagtggccttcacttgagttcagcaacatttattggacacggcacttatttggtccagacactggggacgtaaagaacacagcctggtgggggcacaaggtacagaaaccacgaggccacgctggccctcccagcctactggccccaacctcccctccaagtgacaccctgcgggtgcacatcctatccctctgcccagaagcccctcttcctaccacagctccttctctgactccttggcagagcgtgtgtgtccttcaaagtccagctcagacaccaccctgactgccagagccccttcctaccaaaagtgtcccctccgcatcagtgcttcactctaagccccaaaatctttccattatggccagcatctaccatcaactgcccaattcaaaccccagccactctttctagaatttaacctcaaaatctgtgtcctcatctatagaataataatcgttgctaagttgaatacctgtattcaactgaatttgaatgtgtatagggaggcgcatgtgagaccattcagataacaggccatacgtggtgcctgcacacactagctcttagaaaacatctgctaagtattctgatgactggtttgagtccaaccccctgatctgtggatccctgaatctgtagggtctgacccagggccagagcacagagttctgatattgatctgtcacactcactgtgcccagcattttggagagccctgcaggggacggggagggggacttgccctgtagagagctgggttgctgccccatgtgcttactggcttgtgcatttcattcctcaggttgtttgggcttgataagtgtaaattacgtagccagtgcatgaatgatcagggatacatactttgacctgcactggggcaggaacacaggacttcctcctggacctggcttccactggagcagagcccaaggcagggcttttcctacgcataaagctctgttgtggtttttagaaaccacccccaggaagaggaatggccaagggagcagaaaggaggaaatgtcagccccaaagttgcatcttgagttggtctcctccatggacaactgaggctctgtccttcagtgaccctctgaggagctggggagaatggagcttgtctgcacatgccttgcttataggagtgctggcctggtatggtcctggtatctcaccctgcccaatctgaaaagcccaggagagggcaaaaggggctgttggtcacacctgcatacaacagtggctggcgcaaagataagtgtggaagctgtgaggaggcataagaagtgtccggcgcccagacccatcactccgcaagagacaggcctgttggtgtcatatggagaaagaccctagagctccaagctctcagggtgccagaccaaagattctgcaagacccttgtcggcctgtcacccaatgggtgctctctagaggacagaggggtaaatggcagagacacctgaggaacaggctttcatgacgccacggagcaccaggtaaacctcagacaagtccacactgtgaggcccaggcccaaggggcaggggacaggaggagccccatgccctgttgcagggaaaatctgctgccctggcccagcctctttggggatgctgcatcaggacagcctcaccctggtggcgtcgcttgcctccagtgtgcaatgtctgcaggaacatctgggtccctggctagaaccccttgtcctgcctcttgagtgctcagggtatgctatggaaatgcagacgaattttaacaagatcccaagctaaatgcaatcagggagaaatgaaaacttgggcaaaacacatcacatgttccaaggtcaaaggtgaaagctgtttgtgactgttgcacaccacttcagctctctgtcacagccctgcctctccccagtataccactctgatagttgagtgatgttttaagtatgaaaaactgtcacacctggaaggtgggggggccctggaaacctgagctgctgggaaaacgtgctcccctcctccatgaggaggacacaagcccacacccctaagccactgtatggggctgctctgatggggcttcaggatgtgccccagcctggaaggagcttgctgattcttgcctctgaatggccatgtcctgagctggagcacctgaagacagctatggtgcccagaggcctgggagctgtcgggtagcctggccccactgcaggtggcagatctgggagccacaagaaatgctctgctatttcatactatgcattcttcagaggctggtgcaatagagtttaatcaacttcctctggaagagactatattcatgcagacttgtaagaaagagaaataacttgaactttggtttgtttgctgttcttggtgtgcacattcataaatccctaaaaaccccgaagcacaagcactgcccctgccgttcctgctctctgcttggtggtcaggccactccatgcagcagaccagctcaggcctatgtggcctggaaccatctcttctacatgagacaaggccgggacctctgcccccacccacaagcacatggagagggagagggagccccctgcctgagcagcagagaccccaggaaggaggccaagccctcctcacacaggaggtctccagctgccctctgaggtgaggggtgcctctcccaaacagcacaaagtacagcccagaccagaatgttttggaaggactcagaaacaagaaagtgtgtgctgagtaagggccggggctgcaaaatacagggaagagaagccaccttgcagcctggactgcgggttgtgcaagccctgccggctgcagcctgccctcccaggctggggattaacatgggagcagacggcttggctcagaaccaagtgtgactaattgagaggacaaacaggaaggcttttcacctgcccagacctcattcagggtttcctacgagacgatagcatcaggagccctggcgagtacaggcagttttgttccttgctctgagtctcttgtgctgatgacgtcaaaggggcctaagacagtgcccccaaacctggacagagtgtggaggagaaagaaagctggtgagcaagcattttggccttgaagaccagatcgctcatcccaaagcttgggtccctggcctgggaactgggtttactgattccccttgtgattctagctcctttaaccttaagacggagcctttcttctggcaattacccaggaatgggactttcttccagcacagcagagaaaacaggattaagcaaggggctctggatcctaagacagcctctggagctggcaggagagtctggtggcttctgcactgggccagacttccacccaggtttccagtgacaaggttttaagggagaaatgcaaatctgatgaacatttaactccatgaagcagatagcttcaggtttgtcctgcaggattcagaggtctatgacccctgacacatctacacttgacctgtagccaaaaatagttaaaaagattatagagccctagaaacctggccctgtcttcagtgcccacagggtaaaacgtatcttctgggctcatgggagaggtgcagtcacagtgccctcctgccccctcatacacgggggtgcagagccagaagcaaatgggagacaaacattcccctaaaccctagttccagcccacacagccaaaagccaactcccccttagaaaaccttagtatgcgtgtcagccaaattccttagggttgaggcagaggtgtagcgagggaagcttgccggactagagtcaagacacaggtatgtttagcatgggaaggaaggtatgacagtccccacacacagagacgcagacagagagagagatgcacacagagacacacaaaaacatacagacaagatacagaaacaacactcacaggcacagtcacacagacatacatgcacacatacatgcagactcatacagataggcacacacagaggcacagtcacacacaaagacacacacacacacacacacacacacacacacacacacagagacagacacagatctgtggtcatctccactgaattgccagggacatcactgaaacaacttgaactctgtccacacctgattcaggcaataagtgtctgtgggtcagggcaggggttatgggtggatcccaccgtggtgtgactgtggggagagtccagggcagctcagcagcctccagggaaggacacagcccaggagaagtgctaggggagtctggggccctggtgggtggcttggacaggtagtgggagcagcacccaaggaatacggaggcccaaccagttgagtggcagaggctctagccagcctgggcatgggtgccttttccacccagggtaaactgcagccacaggggcaggggtccccgaggagaaggcggcacaaggaagggctctcaaggcaccttcttgaagaccaggaagactttgtgaaaggaaaataaatctcgggaccccaaaatcactaagccaaagggcaaagtcaagctggtgtaaaccaaaaataaaattctaagtcccccgacaagaacggacccttcctctcagcaagggcattccaaagctaacctgaaaaacaagttcaggccatgatgggaagggaagtcaggcatgactcattataccctcttcccttttggaattactgatagaatagggtctttaagtctgataagaaacatttacaatctattgtctccgaagcctgctacctggaggcttcacctatggtctccacaaacccttatcttaacccagacattcctaagtctttagacaataacttaactctttcaaccaactgtcaatcagaatatctttgaatctacctatgagttggaagcccccaccttccagttgtcccgcttttccagaccgaaccaaagtacatttacatgcatttgattgatgtctcatgtctccctaaaatgtacaagctgtactccatccaccttggatacatgatctcagaacctcctggggttgtgtcatgggccactggtcactcatatttggctcagaataaatctattcaaatattttagagagtttgactctttttgttgacactgggaactgcgtcaggcctcccattttattcctaaataagatagctacaaagattaaaaaaaagctacatacctccttcacaatttgcctcaagatctataccctaaaacagttctgttgattttcaccctggcaatgtaaattggtaagttatcttcacaggtatgggacaaaggacagaactcaaagtcatccctctggtcacctgagacaaatgcatatctgatggcttcctctgccctattgtttatgtataaaaatgaagatttggccgggcacagtggttcacgcctataatcccggcactttgggaggctgaggcgggtggatcacctgaggtcaggagttcgagaccagcttggctaacatggtgaaaccctgtgtctactaaaaatattttaaaaattagacaggcgtggtggcacgtgcctgtaatcccagctactcgggaggctgaggcaggagaatcacttgaacccaggaggcagaagttgcagtgagccaagattgcgccactgcactccagcctgggcgacaagagtgtgaaactccatctcgaaaaaaaaaaaagtgcagattcactgagccaggcttaggcataagtgactattcctctctacctgcctctcacatgtaaattgtatattcagtgaaaggcttatcaaagacccaaaagaatgcaaccttttgtctcttgtttacctatgacctggaatgccctcccactcctcccagcttccagtcgtgccatctttctgcactgaaccaatgtacttcttacacatattgactgatgactcatgtctctctaaaatgtacaaaagcaagctgtggcccgaccaccttggacacatgtcgtcaggacctcccgaggctgtgtcacgggttcatccttaaccttggcaaaattaaccttctaaattgattgaggcaagtctcagatacttttgggttcacaacctgatgagagaacagaaaggccccagtctgctgattgccaccctcaacatagcacacccacatacccccaaatacagcacacacaccccaacacggcacacacagaggctgctgctccaagcagcacaacagctcatgggacattcaggtgctgcctccccttccctgggctcagggccaaacctaaactacctctaaggaacaggtatctaagccaacacatgcacccccagcccctttacaacaagtttcacagaaccttaggtacagagaggtgagaaatttcatccaaatgtaagaaaacagccttctactctcataattgaaggaagtgtgctcaaatgccaaagtgtagtactaagtttctggaaaacttacttccctggctgagggtggtggagggaaggacactgattcatcaagaagaggaaaatattccaagtacaatgtataaaggagcaggcatgcgatatattttttaagaatttccattaaaatggttctttcaaaaaaaagctctgatgcctaacgggtgagcttcagctcccagcaaaaatacacactttgtgaattgtaggctcactccactctgtccttaagtaatcttaacctcgtctaagtttcagatgcccctttatttctcttctatcagtatttggactaaaaaaaacaaaaagaaaagaacaaagcagaagcacccgctattgcaaggtatgctcttacctgcccctctccctgcccattctggcttggtcatgtcagccctgggctgtgaccacctgcctgcccagagcaggggacatctccaagggagaggtcctgttaactctaagcctagcaatgtcctgtgctggctttctggcctagagcagggagaatttgtcctgctcctgccctggtttgtctcagctctgtggaatctaaaataaaagactgaaagagaggactactcaatgattctaagcaaggtaagataggttgtagtgatacctgagcatgcagctcatggagacaggaatgataattttataaactgctgcagatactgaacagaaccttttaaaaatcaaggcttttgatattgataattaatctctgtctctccctattcttttcttttctttttttttttttttttttgagacgaagtcttgctctgttgcccaggctgaagttcagtggtgtgatctcggcatactacaacctctgcctccacagtgcaagcgattctcctgcctctgcctcctgagtagctgggacaacaggcatgtgccaccatgcccacctaatttttgtatttttagtagagacagggtttcctgttgttggccaggctggtcttggactcctggcctcaaatgatccacccgcatcagcttcccaaagtgctgggatgacaggggtgagccaccacacccggccaactctccctcttctttctcaatgttattgtgtgatcaggcagccacaggagcctgtcacttatcagcacatcttgtctcaataccagcctggtggggagcaggggttactgccccccaccacaccaactacttcccattctcttcccaccctcttgaccccatgggcctgctggtggcagcagagtggcacattggccagagaggctgcagaccctctgccagggggtgaagcagctcatcgccagaactgcaaatgcccaggcgcaggacagacactggcctgaaggcaaaggaccctagatgaggttacgggcccagggaaagggaggtgacaccaagaggcacagactgtaaccgcaactctgtcactagagtccagtatcctcacctgcagagtgtggctggtgatgccgacctcacggggtggccgtgaggactgactgagctgaaggaaatcaggcagaggttctgaactgccaccaggaagccaatgctttgttttcagctatgggactaccgttaatgtgggacgccttacagtgtcatagacatcattaaatgctttcaatgctcaagtgcctggttatgtgcctggtactacactaggccacacaaattccacaagcccagggcaaacggctccttaccaaaaagtaaatgatcctggggggaatcctacaaactcccagaaactgcagatgaaacatcagataagcatgtccatacacttttgtatacagaaggtttctcagattctcagagtggcccatgaccctgtaacagctaagaaccacagttctagggcttatgatccaaaaagagagtaggtatgagccatggccaaaggaaaggctgctggtgccagcgactgagcatgaaggcacaggatggcagaggagatgctttcctccccggtgggcaggtggcaggccccactccagcagggacctatcaccttcacgtcagcccatgctatgcaggaccaagtgtgtgtatggcagctgggcaaagtatccagtgagaacatgcacacttgggcctcagatctgggtgtggctggagtctgtggggagagtgaaagcttcaccttggggaggcatgtttggaaagaaactcacttcagcagtctcgaggacttttgccatttgaggtgctgggggtggggagggcagcgatgactagaggctgacagtgtggtcatctgacaatcttaagagcaggttccacttttttttttttttttttttacatttttaagtgtgaatcagaggctgctcctgccccaggccccacagtcatcgcacagagcaaggcgagaggtctcccagccagcacctgagcactctctgctgcccttcaaacatacaccaagcccacacttacagggcctttgcacttcttcccaaagcctgcactgctctcagacatcgaaacagtaatattttgcataacaccatttaacctgaaaagttgggctgcaagtatgacttcaattaaaaaatataatagactatgtgagtgggagtcatttttccagctaacagtcattttgtgctgagtatgatctaagagcattaaatgtacatttatggcgggaaaagcagcaacttagggagctccactggaacaatataaaatcctataataaaggctattcatggccaggtgcagtagctcatgcccgtaatcccagcactttggggaactgaggcaggtggatcacttgagtccaggagttagagaccagcctggacaacatggtgaaactccatctcccccaaaaaatacagaaaattagccaggtattgtggcacacacctagagtcccagctgctctggaggctgaggcaggagatcacttgagcccaggaggcagaggctgcattgagccgagatcacactccagccttggtgacagaatgagatcctatctcaaaaaaaaaaaaaaaaaaaaaaaaaaaaaaggctattcatgaaaccaaataatttaaacatatggtgagcatatgagcatagtattcataagtgtttcagttttgaaaatcacatttgtaataccattttcaaataataattataaaattcagcaagtagtggtgggaaaactgaaatatccacatgtaaaagaatgatgccggacccttagctgaacgatatgaaaaaaattgactcaaaatggatcaaagatctaaactgaagagataaaactataaaacgaagaagaaaacacaggagaaaatccttgtgaccaaacatttgacaatgatttcttggatatgacaccaaaagcacaggcaataaaagaaaaaaatcaataaactagatttaaccaaaatgaactcttgcacatcaaaggacactattaatagagtgcagaagcccagagaataggagttaatacccgcaaatcccacatctgataaggcgttcgctcctgtaactcaacaacagaaagcaaacaacccaactcaaaaatgggcaaaggccctgaatagacttttctccaaagaagagatacaaacggccaataagcacaaggaaagatgctcaacattattcgtcattagggaaatgcaaatgaaaacctcaataagatgcatttcacacccattatcaatggctattatcaataaaacagaaaataacaaatgttgatgaacacgtggagaaactggagcccttgggcactgctgccggtggggatgtaaagtggtgcggctgctgtggaaagcggttggcagttcctcagagagctacacacagaattaccatgtgattcagcaatttcactcctaagtacacaccccaaaaaattgaaagcagaaattcaaacagatacctgtaccccaatgttcacagcaatactattaacaacagccaaaaggtgaaaacaagccaagtgtccctcaacagatggatgaatgaacgaaatgtgctgtgtccacacatgggatgatacagccagaagagggaacgagttctgacacacgctacaacacggatgaaccttgaggtcacgatgctaagtgaaatacgccagacccaaaagaacaaagatcatatgactgtacttctatgagatgcgtggagtagtcaaatgcatggagacaaagaagagcagatattaggggccaggggagaaaggtttagggaatgtgttgttatataacgggtacagagtttctgtttggaatgaagaaaagtttcagaaatagataatggtaatgattataaaacactatgacatacttaatgccactgagtcttcactttaaaatggttaaaacataaattttatattaggtatatttaacaatttttaaaacttttaaaattacaaattaaaaaggacagtaacaacacttttcatctcatagcatgcactaattagcacaaagactccgatttcttagtctacatctggagataaatttaaatgtgtgcattctcagagcagagaggcagccatggctcttaaagatgagagtttgtgaagacagaggtgtaccagttatctcttgcccttcttacctgagcctggactcaaaaagcatccaaagacctttcaatgccctataggatgccacatcctacactacatcagggtctatactcaggatcctacactggttggagaagttctgaggcattctcagcatctatgccatggaagaaaacagaacaaacttcaggacttctcagaaattagtaagtctgcaaaagtttttatcaaccttttccatttatattaacgtgtggcaaaatagctaatggcaggtccagccgaatcaatggaatgggcaggcacatttacaagctttattcaaaacctctgtaaaccaaaaataaaattctaagcccctcaaccatctgaatggacccctcctctcagccaagggccttccaaagttggcctgaaaaactagttcaggccgtgatgggaagtgaaggtcagacatgcctcattatgtcatgatgggacgtggaggtcagacatgcctcattatgccctcctccctttggaattcaggtacaactgactggtataaacattaaaacagagatcttgagactttttgttgcaatcagacaccaaattctagcttgactctagtatagcatcacatgacagacaccaggccatgaaagaaatcaaaatattttacccaaaaatacatttctttgacatattttgaaagggccctgcaaagctgtctcttgtggggaaaaatctacattctgtagagaatccttttcctcttctctgatccaggagagaattaactaagagtctggtaccttaagtctggtaagaaacatttccaatctattctctctgaagcctgctacctgaaggcttcatctgcataataaaaaccttggtctccacaacagatgctccctcctagggattccaggtcttctgataataacttaactcttttaaccaattgccgattagaaaatctttgaatctgcctatgacctggaacacgccccccgccccctccaattgtcccgcctttccagacaaaacgaatgtatcttacatcctacatctattgattgatgtcttatgtctccctacaatgcataaaaccgaactgtggcccatccaccttgggcacatgttcccagaacttcctggggctgtgtcacaggccattggtcactcacatttggctcagaataagtctcttcaaatattttacagagtttgactcttttcatcaacacttccttgaccccggcctgacttccagccttggtctaattttcttcaggctccagacctgtgatcctatgcttggtactttaattaactttaaaatcctctggaatgagtgaatggcacaggcgatataactgtagggaactagaagaactctgtggcatgaggcttatcccaagctatgccacgaggaggcatgggtctccaaagccccccacgaagtctccatattgctctccgtcagaacaaggatttgctcttttcggactgaagagaaagcagctctgatggttaatgagctgccagacagcaagaggaatgctcggagccatgtgggggaaggggtgaggaaggagggagtcaagtctgacgtcgggcctgccaggtttcacacctttacatacaaactgatggtaccaaggagaaaaatagttccttaacttaataaatgtaagaggaattctgttaaaattacatttcaacgctgggcatggtggctcacgcctgtaatcccagcactttgggagaccgaggtgagcggatcacttgagatctggaatttagaccagcctggacaacatggtgaaaacatgtctctactgaaagtacaaaaattagccaggcatggtggtgtacgcctgtaatcccagctactcaggaggctgaggcaggagaatcgcttgaacccaggaggcggaggctgcagtgagccgagatggagccactgcactccagcctgggcgacaaagcaagactcttgtgtcaaaaaataaaaatataggccgggtgccatggctcatgcctgtaatcccagcactttgggaggccgaggcgggtggaacacctgagatcaggagttcaacaccggcttggccaacatggccaaaccccatctctactaaaagtaacaaaaattaactaggcctggtggcgggtgcctgtaattccagtgactcaggaggctaaggcaggagaattgcttgaacccaggaggcggaggttgcagtgagccaagatcgcaccactgcgcttccagcctgggcaacaaaagcgaaactccatttaaacaaacaaacaaacaaacatttcaaaatatatgcactattttactttgtctgattttaaaattcacgagatctgcaaagtacatgctttttatgaataccttttaaaaaactgagtaggttttctttagataactagttgtagaaaaattaaagaacctgtgttttcctgttgaccttcatatgaagagcaggaggcagatcactccttaaaactggccttatgtacttttcctaggatatacattcaaaatatggagttgtcacatgtttcttcctaaaagagttttcgtaagaactcttgctattcttagcacctcaaaatcaggagaaaagaaatgatccttcttaaacacatccatccactaattagctaaactacacaacatccaagagtctggccaacgctcactcctctctatacactgttgaccccatctctggcagaaagaggtcctgtagttctagaggcagcattccccattaccttattaaataaatagcaatcaaaaagaagatagcaccatgctattaagtatagaaacacaacattcttaattttattcaccaataatcaggacctacagaaccacacagcacagatggatcgatttctgcctccatgaattttaaattgccttttgcaacattcctctggctcagatgagctagtgttccacaatatgctggctcgtgaaatccaagcaactgtgccttcctctacacttcttcactcagcctcagccttaaattgcacactgcctataaaaatgtacttaaaagaaaaatgaagttactctaaaatgccatatgcaacaaaacagcttattcttgtagatggggctgccactggtggggtgcacctgcatttgttttgctcttacagcatgcccagagcccagcagccctccagcatcacaccgaaggaagcagcccaggaaaagaagggaatgtgttcacgtgacgtgactttaaggattgatttaaatggtgacatggttacgctttgcgtccccacccatatcgcatcctgaattataatccccataattcccatgtgtcaagggagagaccaggtggaggtgactggattatgggggcggtttcccccatgctgttctcgtgatagtgagttctcaagagagctgatggttttataaatatttggtaggttctcctgcattcattctccttcctgccaccttgagaagaaggtgccttgcttccccttcaaccatgattgtaagtttcctgagacctccccagccacagtgaactgtgagtcaattaaacctctttcctctataaattaccaagtcccaggcatttctttacagcagtgtgaaagcagactaatacaaaaggcaactctcaccaatcatggtgtccatgagaaatgaagtgtattctcccttgctctctgccagtggcctagaaaacaagctggatggcaaccagtaggtagataacacagacatggcagggccctggcatacaggcacacccatgcacaaaaagggagctggaactatcatttcatttatggaatctcaactaactgcatgtgttctaatctattatacaagttgtttttacagcatttgttataagaaaaataggacttctaagtttatagccaaagggcccagaacagtttaaggaagagttttttttccaccaaccaagagtagcatggtaatatgcagaaatctaacttcctaatatcaagtttagattttagacagcaagggtcgtaatacaactcttctgattttctttattcaaaaataaaagaggcacaaaaaatatagaactaaaatgcccaatgtcatccgaaatagcaggttcaccaaaaggttataaaagtaaacttgcattttggggggattaattacaattactagagagagaatgaattgcttttcaaagaaatgtatctcaagaaaatgctgactaatggggtagatggttattcaatttccctgttttataggtgaacctacaggtcatggtctgctgagcagcaagaagctgccctaagcaagccctcttccagccagcacagacatggaccacttttccagaaggacaggttctttcatggcctctcctttggcaagcttaaccaaccacctacaagcactctcacttccaagacaaagttatgtgggatacatatcaattcatgtccatctctagtcaatcacattttgccaactctaacacatggtacatggtgatggttttggagtatcaaatgagggatctggggagaagggacaccggcattttcaccaaaaccctggtggccgagcacacctacacattatgctccagagtgcggagatcttccaggagctcctgggctgcggtttgcaggcgggggttgcggctcttggacattgccaggatgcgttgcaggggcagggagctccggaactcagaggccgacttggagaagacttcaggttccagaaccacagactggacaagcctcagtacatgaaggcacacctctgcatctggatctagggaaaagaggtaatgcttctggttagaataaaattttcttttttctttttgttttatttttttgagacagagtctcgctctgtcacccaggctggagtgcggtggcatgatctctgctcactgcaacctccgcctcccaggctcaagagactctcctgcctcagctttcctctgtaactgaggcaggagtttcccaagtaactgagataacaggtgtgtgccaccatgcctcgctaattttttgtatttttagtagagatggagtttcatcatattggtcaggttggtctcgaactcctaacctcaagtgatccacccaccttggcctcccaaagtgctgggattacaggcgtgagccaccgcgcctggcctagaataaaatgttctactgcaatctacccctcaaggggttcctggcctttctgaataacacgtttgacagtttagaaaactacaggataacccagaaacacagtcactgcttgatataaaagcttagctcataaaagcagcatcaaaaaactcaatagtctaataaccatcatcttcaaatattacagtcatacaattttaaagtgttaaactagaaagatgagggctttctctgtttgctagtgaggactaaactctgattttttttatcttgcccaaattcctatctaaggggtctggggagtcatgtcctacaaatcacaaattctcatcagatgggttttatttaaccctatatatcatgactttccaacctgactctggcataacattatgagacaagaaagaaaataaaaatactttaccccaaaatatgtttctttgccatattttgaaatggccctgcaaagctgttctttgtgggggaaaatctgcatttgtaaagaatctctactaacatagctagatctttttcttcgagaccctcctaatcctaaagagattaactaagatctgaataggaaacatctgtcatctattgtctctaaggcagccaccataagacttcaaaagaacttggatgtccacaatctttaccttaacctgaacattccctttctatcaatcccaggtctttatcaatcagaaaatgtttaaattcacctatagcctggaagccccacgccccccagctttgtcccacttttctggaccaaaccaatgtatttcttaaatgtttttgattgatgtctcacacctctctaaaatgtataaagccaagccgcacccaactaccttgggcacatgttctcaggacctcactcatatttggctcagaacaaatctcttcaaatattttgcagagtttgactctttgtcgacagtagcattctgtccacttataagattgttttaaaaagtattacttctttttcactccaattgcagcaaatccctcagggaccacatacagatacagcacttatcagggccactgagtttacacaatgtcactgggtatataaaattcacgttgtttattttccatgggaatggccccaggacttatagaatctggtagccttgcatacattgtagcaaccactaaaaaatagctagacaaacccactggaagcttcaatccatcaccagagtggagccaactttccttaccattcctctctactggcagcctttacgatgccgtaaattcactccttgactgggtactgcaactggaaccaggctcaaaatcagcacctctttcttagcacatttacttaacaaataaaaaaattaaaaaaaaaccttttaagatgtagactgaaagagcagactgaacagtctctcagtgggagctgccacagcactaagccctaacaagaagcttctcacctacagaatcagaagactgctgtggccagggaagataaaaggcaatctgctctagccctcagggagggtccaggagccatcttaagccagcctgttagagtcctcctactttgggggaagggaggggaactttctctagtagagacctgccaaagataaggggcagctaaggcagacacagaggcaaggccaaaagccatgggtgaagacgctttggcaactcagccctcatcctaagctcaaggaaaggttagaggaatttgaagccagtgggatggaaggtacatacacaacaacaaaacccagacccaccttaactccccaacaatgaaaacccagcggaaaaagaggagtggccattcctgaatataacactatctacccacctcattcccctctacagagagggtacgcatggcccagaggccaaaggtagcccatgacccgtttctgtacagcctgcaagctaagaatggttttactttttttttcttcttcttcttcttctttcctcctcctcctcctcctcctccccccccctcctctcctcctccaccacctcctcctcccccccccctcctcctcctccttttggagacagggtcttgctctgtctcccaggctggagtactctggtacaatcatggctcactgcagtctcaatctcctgggctcaagccatcctcccacctcggcctcccaagaaagagggaccacagaacatgtggccacgcccagttaatttttcacatttttttgtagagacggtgtctcaccacactgcccaggctggtatcaaacccctgggctcaagcaatccttccacctcagtctcccaaagggccagaattagaggcatgaaccattgcagcctgccaggttttacattttttaagggtaattttttaaaagtaaaaaccagaagaataacatgcaacagggactacacgtggctctcaaaactcaaaatatttatttggcccattacagaaaaagttttttgaccttgcctactgccctccacacaatgtccaacactgaaatcaaaaattacaatgaagaggcaatggaggccaggcgcagtggctcacacctgtaatcccagcactttgggaggccaaggcgggcggatcacgaggtcaggagtttgagaacagcctggccaacatagtgaaaccccatctctactaaaaatataacaattagctgggtgtggtggcgcacgcctgtaatcccaggtactcaggaggctgaggcaggagaatcccttgaacccaggaagcagaggttgcagtgagctgagattgcgccactgcactccagcctgggcaacaaagtgagactctgtctcaaaaacaaacaaacaaacaaacaaacaaacaaacaaaagaaggcaaaggaaacaaaaggctcattgtcaagtgacaatcaacagaagcagacacacagataacctggaataataatacaggaatttcagaaaaagaatctgaaataaatatgatcaatagatgggaaaacactgttttaaggtacttacactatacctgaagcagcggattattatttaaaggtaaacagtcatgcaatgtataacatttcagagagcttcattgtcaaattctatcaaaaaattagaacagaaataatagaaattttaaacaagtcttccagaaaacagaaaaggaggaaataagtcaacttttttttatgaggccagaattacactgacaccaaaactagataaagatgttaaaataaaagaacagaccaatatccctcataaacaaagacacgaaaatcctaaacaaaaaaatagcaaattgcattcagcaatatataaaaaggataatacttcacagccaatagacacttattctaggaatggaaggctggctcattatttgcaaatcagtcaacatcacctaccgtaacaacagactaaagaagaaaaaaaaaattatctcttcaataaatgcagaaaagccttttgacaaaattcaacatctgttcataacagtaataataataataaaccctcaacaaaacaggaataaaaaggaacatcctgaaccagattaggggcatctacaaaaaacacacagctaacatcatacttaatgatagaagactgaatgcttctttcctaagatgacgtacaaggcaagaatatcctatcacccctattcaaaatcatactagagatcctagcctgtgcagtaaggcaagaaaaagaaataaaaggtttattgattagaaaggcagaaatgaaactgtctctatttgcagatgatatgattgtctatacagaaaatcccaaagaaactagaaaaaaagttattagaactaattgagtttagcaaagtcacagaatacaaattcaacatacaaaggtcaattgtatccacatacttataacaaaaaattaaaaatctaatgttttttaaaaattaccatatattatataatagcaccaaaacatgaaacacttaagtataaatctcatgaaactatgtgcaagatttctatgctgaaaacaacaaaacacagatataaggatccacagacatatagatggagagaatatgccatatttatggactagaagactcaatattgttaaaatgtcaaatctcctcaaattcatctatataatcaatgcaatgccaaccaaaatccaagttgaaattttagcagaaatcaacaagtaattctcaaatttatttggaaaaacaaaggaactagaccagacaaaacaatttagagaaagagaaatgttggggaattgcagtactagatttcaacatttatggccataaagagtgtggtactggtcaagtgacagagcgacagacaaagagataagtgaaataaaattagaggatccaaaaacagaccacagctttgtgaactctcaacaaaggtatacattcaattcaatcaagaaagaataacctttacaacaaatggtgctggaaaaattgaacatccatatgcaaaaacaaagaacttcaatctataccttgcctaacatacaaaaattatacaaaaattaataacatacctaaatgtaaaaccccaaattttaaaacttctggaagaaaacaggagaaaaatctttgtgaccttgaattaggtaacaatttcctagacacaaaaccaaaagcataatccatacaactaaataatttattagccacaccaaaattttaaaaatctgctcttcaaaagacagtcacaatgaaaagacaagccactagatgaggacaaaacatttgcaaaacacgtatctgataaaggacctaaatccagaatacacatacatctctgaaaactcagtaacacaacagcccaataaaaatagggaaagtgtttgaaaagacacttcaccaaaggagatacacaaatggcaagcacacaaaaagatgctcagcatcatggctattagaaaaatggaaattaaatccatacctattagaatggctaaaattaaaaaataaaaatctgaaaataccaagtgttgacaagaatgaggaacaactggaatgttcatagattagtggtgaaaatttaaaatggtactgccaggccaggcgcagtggcttacgcctgtaatcccaacactttgggaggctgaggcaggcagatcacctgaggtcaggaacttgagaccagcctggcctccatggtgaaaccccatctctactaaaaatacaaaaattagctgggtgtggtggtgcacgcctgtaatcctagctacttgggaggctgaggcaggagaatcacttgaacccacgaggtggaggttgcagtgagccgagatcgtgccactgcactccagcctgggcaatagagcgagactctgtctcaaaaataaataaaataaataaaataaaataaaataaaataaaataataaaataaaataaaataaaataaaataaaataaaataaaataaaataataaaataaaataaaataaaataaaataaaataaataaaatggtacaaccacctgagacaacaatttggcaatttcctatacatttaaacacatacttaccacataactcagcatatgagttatatgctgagatagttttatgtcacaactcatacaattgtctactaacaagtgaattttgttctatgtaaattataactcaacaaatctggctttatattaaaaataagaagaaggccaggcttggtggctcacgcctgtaatcccagcactttgtgaggccaaggtaggtggatcacctaaggtcaggagttcgagaccagcctgaaaaacatggtgaaaccctgtctctactaaaaatacaaaaattagccaggtgtcatggcaggcacctgtaatcccagctacctgggaggctgaggcaggagaatcacttgaaccccagaggcagaggttgcagtgagctgaaatcacgccattgcactccaacctgggcgacagagttaagactgcatctcaaaactaaaaaaaaataaaaataataataagaaattagatccctggaccctctcccctattccctgcctctggaaaaatgcccttccctagtagagactggacatttcttttcttttctttttttttgtgagacagagtctcactctgtcacccaggctggagtgtagtgacgtaatctcagctcaccgcaacctccgcctcccagttcaagtgattgtcctgcctcagcatcctgagtagctgggatcacaggcacctgccaccacacccagctaatttttatatttttagtagagacggggtttcatcatgttggccagtctggtttcgaactcctgacctcaggtgatccgcccacctcagcctcccaaagtgctgggattagaggtgtgaaccaccccacctggcctggacatttattttctaaagaatctctggaggtgaaacatcaggcacaattgaggatggaggttctgtctggaaaacatgtggattagataaacacatacctacaagctctaagacattccctctatctctactttgtttccggagtttataggccttcatccctccagaaataagggtgggtgagtcttctccagacaatctgaacaacccaagacaacacagtcgaagatactgacctatgggttcccaattaattgatgcaccagctcacactgcagaaaagttcagaagctccacccatatgctcacagcttccaatcggcattataaatcccactgttaaacatgaccagacaaccacacatcaccagacacctgagaaaaagataaatggctatcattttaaacaggaacaaaaggaggacaaagaaaagagattgtgcagtgagaagaaaagttttaaaaaactattattaatatcttcctcaaggaggtaaaagaagctatatcatctgttaaacaagaatgggatgctattttttaagacaattaaaaataaacagcagtcttagaaattaaatgcctgagagtagagatgaaaacttcaataggaagtatgaaaaaagaagttgagagtacagatgtcccctcttatctgttgctaaaactttctgtggtagtgccggcatgtgtcaaatacaatcaaacttgttcctgtcaggtgctttctgacagtggcaaagctctcagggcacacactgagcattccctcctcctatgggcttcctggccacctccaaagcacatatggattctggaccatgtcagccacatcttaggcaatgccccaggctccttgagcacctaggaacatggagtcatcgagcagcaacataagcccattcttacaagcttcaaagaacaagaaggcaaaaaaaaaaaaaaaatcttccttgaccccaaactggcctccagttctgcccagttcttgactcccttcccaggaatattacaagagtggtctgttgttgctaccgccccacctcaccttcacccttcagtcacgctaccatctgctcactgctgagacagcttctctcaaggtcaccaatgtcctccatgttgtcactgctcagctttcgtctcacttgactcctctggcttttcttggcttccatagcactccttcaccagtccctccttatacttctcctttagatgctagcccagggctctgtcctaggcttccttctctttctactctccttaggtgacttcgtctactccatgacttcaaatcccatgtatctaccagtgactctaaatccatttctccaaccccagcctttccctggaattccagacttcatagccacaaaaacttgcctggacaactccccttgggaatttactgccaactcaggtttcacaaggccaacacccaactcctgattctctgtgctcctgcctcatcttccccatctcagtaaacaacgttaccatttacccacccaaagatgcaggtattctcagtaaacagcattaccatttacccacccaaagatggcaggtattgttattgattcgtctcttctctcacatcacatcttatcaactctacctcccaacacgccctaagcccataaccaccaccctagtctaagctatcctgcttcccccagactactgtaatagccttcttggtggcttgcttatttaattttgcattcttgcctcttcctacccctatccatctgccatgctgcagctagaattaaactgtttgtttgtttgtttctttctttgtctgagacagagtctggttctcttgcccacgctggagtgcagtggcatgatctcagctcaccgcaacctccgcctcccaggttcaagtgattctcctgcctcagcctcccgagtagctgagactacaggcacatgccaccatgcccagctaatttttgtattttaaactttttaaacagaaatcagaatacacaccttccctgctctcccacagatcctcactgcactcatgatggagacccaagtcctcgttctggctgatgaagccccgccagatcaagccctcctgcttcccggcgttcccctcgtatcactcatccatctgcaccatgccccaggagcgccagcctgctctgcattttcttaaccagaatgttcctgccccaatcttcacatgtcttgctcctttcaaatctcactcagtagagcaattccagctccaacatgctgagaactaagctccgattttttaaatcttgcccaaattcctacctaaggggtctggggagtcatgccctacaaaccatggattctcatcagatgagttgtatttgaccctatatattgtgacttacttttcaatctgactctggcataacattatgagacaaggacaaaatatttaactccaaaatatatttccttgccatgccctgaaattgccctgcaaagtcttttgtgggaaaaatccacattctacagagaatccccttcctcttttattttccttcctttctttgcagatccaggagataatcaattaagagccaggcacccttttaggtctgataaaaaacaatttacaacctgctctctctgaagtctgctatctacgggcttcctctgcacaataaaacttggtctccgcaatcctttatctttaacctgaacattcctttccattgatcctaggtcttcagacaacctcaaccagttgtcacccagaaaatgtttaaatttacctatcacttgaaagcccctgctttgggttgtccacctttctaaactaaaccaacgtaattcttaaacatatttgattgatgtctcatgccttcctaaaatacattaaaccaagctgtacctcaaccaccttgagctgaatgttctcaggacttcctgagggccgtgtcacaggccctcattatggtcactcataattagctcagaataaatcccttcaaatattttacagagtttgacactttttgtcaacaatgcaaagagcttagaaatcagcacttccatccttcactaagaaaagcagaacaaacaaatcaatgacttttcttggacccatcaaagaattaaggccaccatgaaatctggagagtcacaacaagatctgcttccctggaggaaaagctgctgtagccataccggtgggaacatttaaatgacaaattgttggaagctgagggtggacaaccatgagaatcaggaactcctgggggtcgcagtcttaggggggccccatatttttgtggattttgtctctaggaaccccatgaggttctcaaagtgcgaagaaagctccctcgtggctctggcagggggacaggaagagtagccattatgaatacaccctgtttccagggaaagacctcaccagagccttatctcacctaaagggaagggcttttctcccactccaggcctctctgccatccctgacttacctaagcaggggagggggttaagaaacacttttgaagaccaaagcccagagacacaggcccactaaaagattgagatgataaatacttctcctctccacacacaccttaaatcataccaacagagatgagagagcataacacgcaacagggatttttaaaacggtattatagctgagagagctgaaagacatcaattccatctaaggaggaattcttagggaaacccaaagggaagaggggagaataaacaaggatgctagaagagtataaagcctctgtcccctacagtaaacacagcccaactcctagccagattaccaaaacacctcacgctaaaggcctattttcctcagtccccattacacaataaatcatgtccagctttcaaccaaaaattgcaaggcattctaaaaggaaagaaaaatcacagtctgacgagacaaaccaagcatcagaaccagctgcacagatgacagattttagaagtatcagatagggaattcagaatatctatgattaatatgctaatggctttgtattagtttgcccagcctgccataacaaaataccacaaactgggtggcttaacaacatgaatttattttctcacagtctctagaggctggaagtctgagatcaagttctcagcaggcctgctttcctctgagacctccctccttggcttgcagacgccaccctcttgctgcctcttcatgtggtcatccctctgtgcacacaggcccctggggtttctccatgtatcttcatcttctcttcttataaagacaccagtctcactggactagggtccaccctaatggcccaattttactctaatgaaaagtccctatctctaaatacattaacattctgagagactgagggttagaacctcaacatataaatggggggtggggagggggagaacacaattcaatatataacaaattctaatggcaaagtagaaatatgaaagaacagatgtataatataaacagaaatggaaattccagaaaagaatcacatttcagcttacatattctctcctcacagaggccatcccttatcgcccactcattgtcaagcccattaacctattttagttctctcaataatagttattctatgaaataggaataagtgttcttccttagtctgaaagcttcatgaaagcagaacattggctgtgttgttcaccaccttacagtaagggctcagtaaatatttgctaaatgaatggaaaggatttattttatgtggctaaggctgatgggatacaagggacacaaatgataaggaaatttctggacaaattgcatcactagtcaagctgaagagatagctatgtgagccccctgaaagggtaaaataaaacaggccactttatccatgagacaaatgctgtcaagggcacaacccaaatggaacaacctcatgaggacatcatcctaaggaaaacatggaacaacttcatgaggacgtcatcataaggaaaacactacagcagggtgacagcctttgaggggaacacagacgaaaagaatgtgaatggctgataacgcaccaaaactctgctcacaacataggtagaagaataacacagagctcaggtctaatcatgaaaagcctcattacttgagactgagaacatttacgatagtcatggctgaactttgggtttaaagacacatgaggcaacttaaatgaaaaagaaaattgcctgacatcagcagaaagatgacacagatgttcaaattatctgatatgatttatggtggttttaaatcggccatcaaaaaatttctttagtgagcaactgtgctagaaaccaatgagaaaaaaacaacatataaagaaaaccaaaatggaaaaattaaaacagaaaaaataaaataactgaaattaaaatcttggtgaagacagaatggaggggacagaggcaaaaaaaaaaaaaaaaaatcagtaaattggaagataggacgacagaaactacccattctgggtaacattatcaagatagccagctagaagtgcctagcattcaaccccctcacagagacagccagaacaatgaatacacaactacatgttaacaaaaacaactgagggagagtgctaaagtgcattagaggagtaacagaaaccctggcgagcccagaaattcatgatagtcacaaaaagaacagaaggaaatgccgggcccctggcaccccatcccctaaccagggtcagctagaacccaggaaaacacctcccttcagtgaggaggtaatcaagaggaccccagcagcccccaccaacaccgtggacacccaccgccctcacccttggggtcccttgcagtcctcacaggcacgaagcccagggtggagtgagctgcctggaggccacaccactgtgctcccgccggagaaggaatcgacactgtgcctgcccccgtggccctcacggtgccctcttggaactggaactactgctggagtgtatcttgttcctggggtagcagccccagctccccttcacccctgaagctaagccgctgcccaaccaccccagcccagtggccccacatcccccagccaagctgcaggcagctgttacacctcctctgtggggccaagcaaaggtggggccactccactacccgctcttgccccctcaggctggagctaaagccataaacggcctccagggaaaacaataccttggctgctcagagcagtcatgcctcctggaacccaagttgaagaagcactctgcatccagggaaatgcctgggccacccaggacagtcccgtccctcaggcctgagtggaagcgacacaccaccgcaaggggaatcagtgccctggctgagctgagcagctgcacatcccagggctgagctgatgcagtgccctacatcccagagaaacagagcagtagctgagcccagacatcccaccttacaggccaaacaactcaactgcctgcttccctagagctgaactagccccccaccccagtctgagctgctgagacacctctctccctgcagagtggagtcatggatacgctgcttcccaccctcctcagggccccagtgacaggtgtgctctgtcattctggggtacgttctcctgccacacatggcctcacagagtctgggatacttacaagccccaccatcccagggtcttgagtcattattacacagtgtcacatcccctgggaccggagctgccactgagccctgttggctccggttccggaactgcagccataccctggctccccaggcccaagcccccagagcaccccttcttcctcagagttccgccagtgctgtaccctgccccaccccctggggtagaatcacagttacaacctggccccctgggcccgagctgctagagggtgcctcagagtcacagatcctggctctgagggccacctaaatccaaccctgccataagagagcaaacctgtaccccaagacccacatgccacaataggggtcgcaacccagccctgcaaccattacaagcacctacacctggaacccagcaccatggcagctgcttgtaggccatgtcagagcagacatcaaaggaattcccctcagctaagtctccccattgcaaggaaaatgagaccaggaggaccccaaaagcccttgataccaaggacattaacaacttacactgtcaccaccactgtaacaaacttctatagcctgggccactgaggctaacactgaacacagctgaaaaaggttcatggagactataccactgcacctaaccagcaacagtcactacacctttcctaaatggcacactaaaacccaatttcaggtaaaagtctctctctacaaaagccatgctagaaaatctggaaaaggcaattattccaccatatgtacagacatcaatgcagggacacaagaaacatcaaaaagcaaggaaataggacaccaccaaaggaacataataactttctaggaatagaagaccccatcaaagagaaaatcagtgaactgccaaaaagaaaaattccaaatgatcttaaggaaactcaatgagacacaagaaaatacatatagacaattcaacaaaatctggaattcatgatccaaacaagaaattcaacaaaaagtcagaaatcataagaaagaactaaacaaatcctgaagctgaagaattcaatgaattacatttaaaatacaatagagagcttcaacagcagacttgatcaagcagaagaaagaatctctgaatatgaagacaggtcatttgaaactgcccactcagaggggagaaagaaagaaataagaatgaaaaagagtgaagaaagtctgcaagacttatgggacactattaagcaaatgaatttcatataatgagaattatagaaggagaagagagataagggaagaggtatagaaatcctacttaaataatagccaaaaacttcaaaagtctgggaagacatatggacatccaggtccaggaagtttaaaggtccttaaatagattcaaccaaaaaaaattattccccaggcacactgtagccaaattgtcaaaaatcaaacacaaagataaaattataaaagcagcaagataaaagcatcaagtcacatacaaaggaatcttcattagactagcataaaattctccacaaaaaccttacagcccagaagaaaatgtgatgtaatattcaaaatgatggcagaataaaattggcagccaagattattatacccagcaaagttatccttcagaaatgagggagacataacgtctttcccagacaagcaaaaacttaaaggaattcgtcactactagactggccttacaagaaatgctcaaggaaatcctacatctggaagtgaaaagatgataaacactctcttaaaaacccacaaaagtataaaacatactggtacagcagatacacaagggagaaagagaaaagaatcaagccttatcattaaaaaacctcactaaacctcaatgataaaaaacaagataggaagaaggaaacaaagactatacaaaacaactgcaaaacaacaaaatgacaggagtaagtccttacctatcactaataaaattaaatgtaaacagattagattcccccacttaaaagacatagactagctgaattaatttgaaaaaatattaactctctagtaacagaccccagtgaaaagcaaactacatattgcctacatgtaactcatgtcatttgtaaagacacatatagactgaaagcaaagggataaagaaaagatattccacacaaatgaacaccaaaagcaagcaggggtagctttatttatatcagttaaaatagattttatgtcaaaaactataaagaaggtcattatataatgttaaaaagatcaattcagcaagaggatataacaattctgaacatatatgcacccaacactacagcacccagatatataaagcaaatgttattagatctaaagggagagatagactccaatatgataatagttaaaaatttaaacaccccactctcaacatggaacagatcacctagacataaaattaacaaggaaactttggctttaaccacacattagaccaaatggacctaacagatgtttacagaacatttcatccaacagctacagaatacactttcttcttatcagcacacaaaaccttttccagggtggaccatgttaggacacaaaacaagtctcaacaaatctaaaataattaaaattatagcaagtatcttttttgaccacagtggaataaaactagaaatcaacaataaggaactttcaaaattgggcaagtatgtgtgaattaaacaacctgctcctgaacaatcaatgagtcaacaacaaaatcaagaggaaaattttaaaattaattgaaacaaatgaaaatcaaaacacaatatatcaaaaccaataggatatagcaaaagcagtgctaagagggaaatttagagcaataaatgtctacatcagaaaagtggaaagattttaaataaataagctaataatgtatttcaaggaaatacaaaagcaagaacaaaccaaaccccaaactagtacagggaaagaaataataaagatcagagaagaaataaataaaattaaggccagatgtgatggctcatgcctgtaatcacagcactctggaaagcggtgatgggagactcacctgagcccaggtattcaagacgagcccgggtaacaaagcgagaccccgtctctaccaaacaaacaaaaacacccacttgtcaggtgtggcagcgtgtgcctataatgcaagctactcaggaggctaaggtgggaggattgcttggccccagcaggtcaaggctgctgtaagcagtgattgtaccgctgcactccagcctgagtgacaacaagaccatgtctcaaaaacaaaacaaaattaagagtaaaaagcaatacaaaatatcaacaaaacaaaaagttggttttttgaaaagttaaacaaaaatcaaaaaccattagctagaggaaccaagaaaaagagaaaagacccaaatcaataaaatcagaaatgaaaaaggagacataacaactgatattacataaatagaaaggatcatgagaggctattaaaaagaactctattccaacaaattagaaaacctaggggaaatggataacttcccagacacatacaaccgaccaagaagaacaaagaagacacagaaacctgaagagaccagttacaagtaacaagattcaatctgttaaagaaaagcccagaatgggatggcttcactgtagaattctaccatgcatttaaagaactgataccaattcttctcaaactcttccagaaaattgaggaggaaggacttcttccaaacttatgctataaggccaacattaccttgataccaaaaccagataaggacacaacaacaaaaacaacaggccaacatccatgataaacacggatgcaaaaattctcaacaaaacactagcaaaccaaatacagcagcatattacacagatcattcaccatgatcaaaaaagatttatgccagagatgcaagcatggttcaccacatgcaaatcaacagatattatacaacatattaatagaattaagtgcaaaaaccatatggtcatctcaacagataaagaaaaagcatttaataccatctggcatcgctttatgacaaaaactcttaataacttaggtacagaagcaacacaatagaggccatatatgacaaacccatagccaacatcataatgaacagggaaaagctgaaagcttttcttctaagatctggaataagacaaagattcccaccatcaccactcctattcaagatagtactgtaagtcccagctagagcaattaggcaagaaaaaaataaataaagggcatccaaattggaaaagaggaagtcaaattgtccctgtttacagacaacattattgtatacacagaaaactctaaaaggtccaccaaaaattgttaaaataaatgaattcaataaagaaagttgctgaacacaaaaatcaacatgcaaaattcagcagcatttctatacaccaataacacaatctcaaaaataaatcagtgaggcaatcccatttacaatagctacaaaaaatatttaggaataaatttaaccaaatttaaacatgaagtaaaagatctcaaaaagaaaaactataaaacaccgatgaaagaaactgaagacacaaacaaatggaaagacatcccatgttcataaactagaacaataaatattgtaaaaatgaccatactaccaaaagcaatctacagaatcaatgcaatccttgccaaaataccaatgacattcttcacaaaaaaaaaaaaaaaacagaaaaaacaatcctgaaattcataatggaagtacaaaagactccaaatagctgaagcaatcctgagcaaaaaaaaacaacaacaaaaaaaaaaacagactatcacactactctacaagaatggctagaccacacaaaatcttgtataggaatgttaatctagcagcatgattcataacatccaaaaagtggaaataacccaacgtccatcaaatgatgaatgggcgaacaaaatgtcgtatatacacataatgggatattaggtcataaaaatgaatggtgtactgacacatgatacaacatagatgaattctgaaaacacactaagccagacacaaaaagccacatactgtacaacactaattttataaaatgttcataataggcaaatccatagtgacagaaagcagattagtcattgccagggatggagtcactgctaataggtatgggggtttctattggtggcaatgaaaatattctaaaattagacaatggtaatgcttgcacaactctgtgaacatactaaaaaccactgaattgtgtattatgaatgaactttacagcatgcaaattatatctcaataaagccatttttagaaaaatgatgtgagaaaaatagaaaaattctaacaagagctaaagattatctaaaaatatcataccaatgttaattttgtggttttggtaactgttctatggttatgtaagatgctaacattaggggaagctgggtgagagttacttgctactatttttccaacttttctataaagtggggccaggcatggtagctcactcctgtaatcacagcactttgggaggctgaggtgggcagatcacctgaggtcaggagtttgagaccagcctggccaacatggtgaaacccatctctaccaaaaatacaaaaattagctgggcacctgtagtcccagctactctggaggctgaggtgggagaattgctggaacctgggaggtggaggttgcagtgagctgagatcatgccactgcactccagcctgggtgacagagcaaggctgtctcaaaaaaaaaaaatctggatgtcaaaataaggttaaaatttacatagggtaaactgcataaatcttatgagtaaaattaaggtctaacagaaatgcatgcaccacaaaaaacatcgctctgtcaagatacagtgtgtctctccccctgccatgaagctccctcatgccctcctgtcccttctaggcagcccaacccataagtgactgatgctctggtttctaccaccctagattagttctgcttattcttgaaaatcacaggaatggagccacacagaaaacaaaccccaataaagcactatttcactattaaagctctggcaaatgaaaataaataaaattacattctgcttggtttcttctacagtttctcagtttagtcccctcttgacattctggggctattttctcctcacaaagttctatcaagagcttggatggacatgaaaaccctgcctgtatctcaccacgtttcctcccaacagtagacagattttttttgttaatgtgctcgctcattaaaccatttgtgagtgggaaggagtatggggcagagaatctacgctggtgacctggagcagccagcgtaacaagagggccaccaacaactctgaacactgaaacaatctcaaccaggcactcggaaagctcccctggctgatggcctccagctggaaggtctcaagtcacaggtctctgccatggacaaatgcttctggtaagcatacggccactcagtcacatctatcagcagcagcagcatctggcaggaactgtgcctgtggctaggcttaaataactgcaccaatccacgctgaacagctgagaagcaactgagtctaccagctgtgccagttcaattcacaggcatccactgcaggcccagccactggacagaggatgtactgctgggcaatgactggttatcattactggcaggcaacattcttccctactctctgcagggatttggggagaaaactcagaatgagaggtaaagatgtaaccatgcttcaataaaatgatgaggaactttaaaatcccatttctttatacacacagccaaactgaaacatcttatcctaaagctggtgcacgctgacttaggttccttagaaagaaggctccaccaggcacgggcatctgtctgataggaagcaaggtctacaaactccctccttgcccatacttctcttcaccgccccttcctattctccatgtcacactcactgtcaacatcaaggtagctcaatgtttcccaaactgggtccctcaggacactagttccccacaatggtaagagggttttcatatgtcccacgctcacacccagtgggaaggggaagggagggaaaaacaaaatggcactcagagttaagtcacagctaactgagaacaaggagatggcactgagacaccctagctccacatgcccttgtgatagctcttgtcgcaggcattgatttcccagtgccacatttctcagacatgggcactcatgctaacacaaagaaaactcaccaaactcggcctggaggacaccctgacagctatgctggctccttggtacttgctggtgggctcctcaggcacatgctcacagggccctattgtcaaccacaccttcaaatgacaataaacaaatctatctttacttatctgctaattgtctgtttttctaaaactcacacattaaatgcataaactataataacacatgaggcacactgagtgtgcagcaccatgtggaggcgcaaacacagactctggagtcactcaccagcagcccctcggcaaagccatgtcaccttgctaggcctttgttttctcatctataaactggttttaaattctctacaccactattataaagactaaataaaggaggagataccagcaaaactgtctatcacacttggtagatagtaggcattccataaacagtaatttccaaattacacaaactaaagcctcaccccacccccatgctctcctccaacaccccatgcctgccacatgggcctctggctctgctaacacaccccacctcgggcgcttgtacatgttgatccctctggctggaacgtgccttcccagacaccctaagagcttgcttcgcttcctttccaacttgggcctggcagaatggctcctacaaagggtggcgagaagaaaaagggccgttctaccatcaacaaggtggtgacctgagatacgccatcaacattcacagcacatccacagagtggccttcaagaagcgtgcccctcaggcactcaaagagatttggaaatttgccatgaaggagatgggaactccagatatgtgcattgataccaggctcaacaaagctgtctggaccaaaggaataaggaatatcccataccgcatccgtgtgcggttgtccagaaaatgtaaagagaatgaagattcaccaaataaactctatactttgattacttatgtacccgttactgctttcaaaaatctatagacagtcaatgtggatgagaactaacagctgatcatcaaatacatcaaataaagttataaaattgccttaaaaaaaagagctcacttccctcttctttcagatcttcgtgtggatgtcaaccgctcagtggtcttccatgaccactctaaaattaaaacacaaaagctacccctctcaggtctcccgccctttaccctccatggcattaaatatcacagagtccacagtgccctgcgctgctttactggcgctgctgtctctcctcactggctagctccatgaaggcaaggacttggggctgtctggcttgctgctgtggcctcagtgcctagaacaggacctggcacgtagtggtgagtgaattagtgatgtttagtgatagacactgtttctaattatgtaattagaaagaaggaggactactactaagtgtaaatctgattaaagatattgaagacctccattcagaaaactacaataccctgttgagagaaagacggccctaagcagtgaagaaatgtatcatgtcatgtactggaggtctcaacactctaaaaacgtcaattcttccaaactgatctacagattccatgaaatttccatcaaaatcaacacggtgtcctttgtggaatttgacaggcagattctaaaatttatatggaaaggagacaataatagtgaaggcattttttgaagaaaaacaatgttcgttctaggtatcaaaaacttatccatcttgacaagaggcaatgtagcactgcaggatgggagactggccgagtgcaatggagagcacagacacagaccccacacacgtgtgggcaccgaggagagtggggaaagcacagtgccctccgcagtcagtgctgggtctgtgagaaccctggggaacgcttaacttgacccctatcacagagcatgcccaaagataaatgcaaaaggcaaaaagagaaaccgaggagaaaatataggcagatatattcatgaccttgaggtaagcagacattttcttaacaggatacattaagcactcagagtacattcaaatcaggaacttctgttcatcaaaacataccattaagagaaataaagcaagacatggagtggtaaaataaatgcgcaactttaataaaatcaaaaaagattctgtatccagaatatacaaattcagacaacctaaaagaaaaaaaggcaagagctctgaataggttgtgacaaaaatggatatccaaatggccagtaaacacaggaaaaggtgctccacttcagaactcataaaaacaatgcaaattaaaaccacaatgagccagccctccatccccacagaatggctacaatgaagatctctgacaataccaggtgtttccaagaaagaaaagcaaccagaacgctcctttgctgttggtaaatgttcacacctgatataaccactttgcaaaacagcccagcataaactactagaggtgaagacatgcacttctatagatcccaaacttccattcctaaagataaacgcaacaggaaaacatgcacatgtcctttaccaaacgacaagtacaagaatgttagagaagtactatttgtaaaggccaataactagaaataatccaaatgtgcatcaatagtaaaatggataactaaactggtaaattcatacaatagaatacaggttgagcatcatcaatctgaaaatccaaaacccaaagtgctccaaagttggaaactttttgagtgccaacatgatgacacaagtgaaaaattccacacctgacttcacacgacaggttacaatcaaaaggcaggcacacaacacacagtttattcagagtcaccaagggaaaagagaccgttcaggtccctttggctgcgatgtcttttccatgcaggcccggattccccaatgcaagcacacccacaaaggtaataaaatggtgtgtgtgcaggccagtgcaccaagggcaggttccccacattgccccatggagggccagtaaatactgttaaatacttaggtgtgcataagtgagagaaaatgactgcttgtcagccacttataaattcagagtcaggaatgatggtgatgcaaacaaccacagaatgtctacatgggcggctcagagagtgacacctttactttctgatggttcaacatacacaaattttgtttcatgtacaaaattactaaaagtactatataaaattaccttcgggctatgtctatcacaggtatatgaaatacatatgaacatgtttagacttgggtcctatccccaaggtatctcattatggatatgcaaatattccaaaatccaaaacaatctgaaatctgaaacacttcctgtcccaagcatttcaaataagggatattcaacctgtactatagagcagtggttctcaaccagggcgaggggcattttgccatcccagagggcaatctgaacatctggaaacatttttgattgtcacaagtgggagacactattggtatctggtgggtaaagaccaggaagactgctaaaatccctacagtgaacagggcagccccacagcagagcatcattaagcctgaaacgtcagcagtgctgagaaaccctacgaggtggcagtgaaaatgaaccacagctacatgcaacagcacgatggacctcactagcaaagtgctcaatgaaaaagccaacatcaaagtatggtttcatttatataatgttcaaaaatgggaaaatgggagtgggtagtgatgaggaagaagcacacgcatttcctgggtgcaggcaacatgccatttctcaccctgggtggtggtgaacaaatgttcctttgtaattattctctgagcttcacttttatgtttctgtacttttctctaggtatgctgtgcttctcattaaaaatgttttgagaccaggcatggtggcttatgtctgtaatcccaggactttgggaggccgaggcaggtgtttcacttgaagtcaggagttcgagaccagcctggccaccatggcaaaaccttgtctctagtaaaaacacaaaaattagttgggcgtggtggcacacgcctgtaatcccagctactggggaggctgaggcagaagaatcgcttgaacctgagaggagggggttgcagtgagctgagattgcaccactgcactctagcctgagcaacagagtgatactctgtgtccaaaaaaaaaaaaaaaagggttttgaggcttcaagatggctgactagacagatctggtgctcacctcttccacagagaagaaccaaaatagcaagtaatcacacttcaaatagataacctaagagagaactttggaattcaacaaagaaacattcagaaacaccaaaagcaaggaaggaaagaaaaccaaggcagcttgctaggctgggatcaactgggagtcagcagtggctccctaattgggggaaagggtaagtgaaagacccttcccagcagttcacattgctgctgtggacttctacaatccacagccctgggagagtccttcaattctagaggaccccaagactactgcggagagctgcctgaagactgtacaaaggcactgctccacagagagcccacgctgggtgccacaaccccccaaatcctaagctgctgtggcatggcaccacttggagagtacaacccccaatgaactgcagcctgccccgccaccagggtggaggtgggagccacagggagtgatcccccacaccatccctgcagatgggtagccatgtattttcatgagctccaaggtcaaagtcgactacctgcaactgctaccactatgagctgctgcaggcctgaggtgaggtgcaatcaaagcccatgccccctaggtgcctgactacagctgctcccagggaaagaaaccctgccctccccagtagcagggacacaatgaaactctggccacccctacctgagcattccacgggaggcctaggaatcacctcgatgctacttaccacagccaataactacactccccaccaagggacctgagggcaggtccagccagcctgcctccaccatccctccctagaaccagatcacactgtccaggggcctggggatcaccagtagcatctcagcagagtctcccagagtgggtcaggcccactcagcttgctgctaccaccaccgctgcgacccacccatatgtgccacctgcaggtccaaggaccagcccacccaacctgtcacagccgtcacaaacatcagcactttggaaaacagcccagcataagctaccagagatgaagaccccaaagggctgtcccaccactgctgttgccatcacccacaccacaactgctgttgccatcaaccacaccacacctgctgctcaggggctcaggaacccacccacccacccaacccaccactgccattcctagtacccaaagaagccacctggaggcccaagaactggcctgcctggacctactaacactggtgccagtgtacaccaccctggggcctgaggacaggcatgctcagtccaccactgccaccactggggccaaaagactggcctacctggcacccaggtcaacagcaaaatttcaccacagcctccactaacaaccataccctaagccattaagaaaatcatagatatcattaatgctgtttacagccaaagaaatcatacagagactacactactgcacacacccagattcaaaaccaaagtgccctacctaccaataccacagatacatcttcgggaaaatgtcctctcctacgaaagtaaattcaaaaaacttagaagaaatgaccattataccacagagatactaatgcaagggtacaggaaacatgaaaaagcaagaaaatatgacatctcctaaagaaaacaattctccagcaacagattccaatcaaaaagaaatttatggaataccaggaaaataattcaaaatattgatagtaaggaagttcaatagcatacaggagaatgctgaaaaatacaaaggaatttaaaaagcaattcaggataagaatgagaaatttgatccaagagatggatattgtattggtcctttctcacgctgctaataaagacatacccaagactgggtgatttataaaggaaagaggtttaactgaaagaggtttaattgactcatagttcagcatggctgaggaggcctcaagaaacttacaatcatggcagaaggtgaagcaaacacattcttcttcacacagaggcaggaagaagtgctcagcaaagggggaaaagcccctcataaaaacatcagatcttgtgaggactcactcactatcacgagaacagcatgggggtcactgcccccacgattcaattacctcccaccaggtcccgcccaagacatgtaaggattatgggaactacaattgaagatgagatttgggtgcagacatagccgaaccttaccaggtatcataaagaagagccaaacagaaattctgtaactgaaaaattcattgaatgaaatacaaaacaaattcaaaagcttcaataataactagagaagccaaaggaaaaaaatctcaaaacttgaaggcagaccatttgaaataacccagagagacaaagattaaaaaaaaaaaaaaaaagaattaaaaagaatcagcaaaggctttgtaacatataggacatcataaatcaaatattcaaatttttggtgtcccagaaggtaaagaaaaagcaaacagaaacttatttaacaatagatgaaaacttcccaagtctagaaagagatttagacatctagatacaagagtctcaatgatccccaaatagataaaattcaaaaagatcctctccacagtacattacagtcaaactgtcaaaagtcaaatacaaagagaaaaatttagaaacagcaaaagaaaagcatctagtcacccacaaaggaaccctcatcagactaacggatttctcagcagaaaccttacaagccaggagagaatgtgatgatacattcaaagtgctgaaagagaaaaaaaactgccattcaaggatactatttgcagcaaaagtatcctttataaataaaggacagatgaagtatttcttggacaagcaaaagctgagggaattcatcaccactagaccagtcctgtaaaaaatgcttaaggaagtcctacacccagaagtgaaagaacagtaactataatcatgaaaacatatgaaaatataaaaaccactggtagagcaaacacagaaaaaaagaaaaaacttaaatgttaccactacagatcaccaccaaaccacaataataaacaacaagagagaaagaatgaaacaaaggatatacaaaacaatcagaaatcaagtaataaaatgacagaggtaaacctcacatatcaataatagccttgaatgtaaatggattaaattttccactcaaaagatacagactggctcaatgaattaaaaaaaaaaaaaaaaaaaacatgacccaactacatgctgcctacacaaaattcatctcacctgtaaagacacatatagactaaaataaagggacaagaaaagatatcccatgcaaatggaaacaaaaagcaagcaggggtagctttatttatgtcagataaaacagattttaagtcaaaaactgtaaaaagagacaaaagaaggtcattatataatgataaaagtatcaattcagcaaaaggatataacaattccaaacatatatgcacccaacgccagagcacccaacaccagagcactagataaagcaagtactattagatctaaagggagagacagaatgcaatacaataatagttgaagacttcaacaccccactctcggcattggatcactcagacaaaaaattaacaaagaaatattggattgaaactgcacattagaccaaataagcctagcagacgttacagaactatttcatacaacagttacagaacacacattcttctcattagcacacagaacattctccaagatagaccacatgttaggacacaaaacaagcaacaacaaatttttaaaaatcaaaatcattcaagtatcttttcaggccacagtggaatgtaactcaaaatcaataacaagaggaactttggaaactacgaatgcatgaaaattaaacaatatgctcctgactgaccactgagccaagaaagaaattaaggaggaaatttttaaaaagtcttgaaaacaaatgaaaactgaaaaacataccaaaaccaaatgggatacagcaaaagcaatgctaagatggaagtttatagtaacaaatgcctacatcagaaaaagtagaatgatttcaaataaataatctagcagtgcacctcgaggtactggaaaaacaaaaaccaaccaaacccaaaattagtagaaagaaacaagtaataaagatcagagaaaaaaaaaaccacaaaggatcaacgaaataaaaagttgtttttttgacaagataaaattgataaagcacttcctagactaaccaagagaagacacaaacaaaatcagaaattaaaaaggagacattacaactgataccatggaaatacaaaagatcaccagagactattatgaacaactatacactaactacctagaaaacctagaggaaatggataaattcctacacacatacaatctactagattgaatcaggaagaaatagaatacctgaacagagcaataacaagaaatgaaattgaatcagtaataaaaagtctcccagtgaagtccaagactggatggcttcactaccaaacttctaccaaactttcaaagaattaacaccaattctcctaaaactattccaaaaaattgaagagaaagggattctccctaaatcactctatgaagtcagcattatcctgatagtaaaaccagacacggatgcaacaaaaaaagaaaagtatatgctaggccaggtgcagtggctcacacctgtaatcccaacactttgggaggccgaggtgggtggatcatgaggtcaggaattcaagaccagcctggccaacatggtgaaaccccgtctctactaaaaatacaaaaattagccaggcatggtggcatgcatctgtaatcccagctacttggaaggctgaggcagaagaattgcttgaacctgggaggcagaggttgcagtgagccgagatcacgccactacactccagcctgggtgacagagcaagactccatctcaaacaacaacaacacaaaaaaaaaaagaaaagaaaagacaattataggctaacattcctaatgaatatagacttagaaattctcagcaaaatactagcaaactaaatccaacggcacatcagaaaaataacacatcattatcaaatggaacttaacttatcccagggattcaaggatggttcaacatatgcaaatcaataaacatgatacattacatcaacagaacaaacgacaaaaccatatgatcattcaacagatgctaaaaaagcatttggtaaaattcaacatccttttatgataaaaaccttaaaaaaactaaggatagaaggaatatacctcaacaaaataaaggccacgtgtgacaaatccacagctaacatcatactaaatgagaaatgctgaaatcctttcagccaagaactgcaacaagacaagatgcccactttcaccactcctatccaacatagtactggaagacctagccagagcaatcagacaagataaataaataaaaggcagcaaaattggaaaagaagaagtcaaactgtccttctttgctaaagatatgatcttctacctagaaaaatctagagtccaccaaaaaactgttagaactgataaatccagtgaagctgcaggatacaaaatcaatatacaaaaatcaacagtgtttctatacaccaacaatgaacaagctgagaaagaaataaagaatgaagtcgcatttacaacagctaccaaaaaattaaaatacctaggaataaatttatcctaggaggcgaaagatctctacaaggaaaatgacaaaacacagaagaaagaaattaaacaggacataaacaaaaagacatcccatgttcaaagactggaagaattaatagcctcaaaataatcatactgcccaaagccatctacagattcaacgcaatctctatcaaaataccaatgtcatttttcacagaaattgaaaaaaaatcttaaaatttgcatggaaccaaaagaatccaaatagccaatgcaattgtgagcaaaaaaaaagaaaaaagaaaagaaaaagaaaaaagcaagaggcatcatattacctgacttcaaaacagattacaaagctttagtaaccgaaacagcatggtactggtataaaaacagacacacacaccaatggaacagaatccagaatctagaaataaatccacgtatttacaacagaggtgcaagaatataccttgggggaaggacagtctctttgataaatggtgctgggaaaattggatatccatatgcagaagaatgaaattcgatccctatctctcaccaaatatttaaaaagcaactcaagatggattgaagcttaaatgttagacccaaaactaaaaactactagaagaaaatatagggaatacacttcaggacatttggtacaggcaaatattttatagctaagaccttgaaagcacagacaacaaacaaaaatagacaaatgagactatattgaactaaaaaccttctgcacagcaaaagaaacaacagaatgaagagacaatgtgctgaatgggagaaactatttgcaaactattcctctgacaaggggatctatctaaaaggaactcaaacaactcaaataaaagaacaaataatcccattaaaaagtgagcaaaagatttgaacagatattcctcaaaataagccatacaaatggtcaataagtatacaaaaaaaaaccactaatcatcagggaaatgcaaactgaaatcacaatgagatatcatcttacccagttagaatggctatcactaaaaagacaaaaaacagatgctggcgaggatgtggagaaaagggaacttttacacattgttgataggcatgtaaattagaatagccactacagaaaacagtatggagatttctcaagaaactagaaatagaactaccacgtgatctagcaattccacttctggatatttatccaaaggaaaagtaatcaatatatcaaagggatacccccatgtttattgcagcactgttcctaatagacaagagacaaaatcaacctacaaatgtctgtcaacaggtgaatggataaagaaaatgtggtatatatacacagtggaatactgttcaggcttagaaaagaatgaaattatgtcatttgcagcaacatggatagaactgcaggtcattaagcgaaataagccagacacagaaagacaaattttgcatgttctcactcatatgtggaaactaaaaagtggatctcatgaaggttgagagtagagtgactgatagcagaggctgggaagggtctgtgggttgaagtggggatgagagaggttggtcaatacaaacacagtcagatagaaggtgtaagtactaatgtttgagagtagagtagggtgatgatagttaacaacaatgtatactgtatttcaaagtagctagaagtatgtgaaatgttctcaatacatataaataatactcaaggtgatggatactccaaataccctgacttgatcagcctgatcagtatatattctatgtgtgcaataaaatatcacatatcaccccataaatatataaaatattatatataaaaaagcctgagaacagaatgaagggaagaataaaggaagagaaggatgatggaaggggaggacagagagaagaaaagagaaagaaaaagaaacatttgccaaagtccttcccatatctcctggtcaactgaactcgtgttctcccagacccatgaactcggcaatagggttcagcaacttctgcctacccaccctaacccttactgacacatccactccgattcctggctctaccaggatcctcatggcctgggctcacatcctgctctgccacttgctccctgggtgaatcagcactgacctggcagggctggcaagttaatgcatggaaagtgctcacaatagggctcaacacagaggaagcactgagaactgctcacgatcaccaccatcacctcatcaagtactttgtactgtctgaatctagttcatttaagtcttgccttctcggcaaatttcaagttctgtcacacagtatgcaaggtggtaaccctcacagatccaaaccagtgctgtgtacactcccagctgacattgcacctgaacacataccactgtggtgagcagggttggctggacccattgagatgtgcctgcatcacagtgaggcctaatgcacgtgaaatgcctggagtttcccagtcaagtaggagttgctgtccataccctgcatcagggactatgttcatggggtgtgccagcccaggctgtctgtcaatgcgtgctcccacactgtctagtagactaagatctgatatcaggtaaattctaaaaataaataatgccaaacatatcttcgaaataagctacatgtcatctgccgcagcacactcagccaagcaataaaatctacttggttttcctctgctctttgcagatccttttcctttaagctaaagaaataggtgccttgagcatcaaactgtaattttaaaatatcctgaaagccacagatgttctcaactacaatctaagtagtcattcaaatcatgccttgtacactgctatttgttccaagtgaccagcgagcatttttaaaaatctcttatttctgtcaagttcttcataaatctttttggcctttcatggtgttgtttcttctgacggcagctgcccttgccctacaccgacatctgatcatttctctcagatgattacagtacccaccagctcttacatataaatgtcaatgtgtgttactctggaaacaacatgaaggacatctctacaattacttctctgcagtaaagaagaaaaaattaaatgggccaagaaaaacatcccattgaattttttaaaactagttttataaaccaactgtattagtccattttcacgttgctgataaagacatatctaagactgggaagaaaaagaggtttaatggacttacagtttcacatggctagggaggcctcacaatcatggtggaaggtaaggaggaacaagtcacatcttacatggatggcggcaggcaaagagagagcttgtgcatggaagtttccatttttaaaaccatcagatctcataagacttattcactatcacgagaacagcacaggaaagattcacccccatgattcaattatctcccaccaggtccctcccagaacacatgggaactgtgggaactacaagatgagatttgagtggggacacagagccaaaccatatcattcagcccctggcccctcccaaatctcatgtcttcacatttcaaaaccaataataccttcccaacagtcccctaaagtcttaactcattcagcattaactcaaaagtcacaatccaaactctcatctgagacaaggcaagtcccttctgcctatgagcctataaaatcaaaagtaaggtagttacttcctagatacaatggggatacaggaattgggtaaatatagccattctgaatgggagaaattggccaaaacagaggggctacaggccccatgcgagtccaaaatccagcagggcagtcaaatcttaaagttccaaaacaatctcctttgattccatgtctcacatccaggtcacgctgatgtaagaggtgggctcccatggccttgggtagctccacccctgtggctttgcaaggtatagcccctctcctggctgctttcatgggctggcattgagggtcttcggcttttccaggtgcacggtgcaagctgtcagcggatctaccattctggggtctggaggacggtggccctcttctcacagctcccctaggtggtgccccagtagggactctgtgtgggggctccaaccccacatttcctttctgcactgccctagcagaggttctccatgagagccccatccctgcagtaaacttctgcctagacaaccaggcatttccatacatcctctaaactcttggcagaggttcccaaaacccaatttttgacttctgtgcactgacaggctcaataccacatggaagctcccaaggcttgaggcttgcaccttctgaagcaggacctgagcactatgttggcccctttcagccatggttggagtgacagggacacagggcaccaagtccctaggctgcacaaagcacagggaccctgggcctggcccatgaaaccactttttcctcctaggcctctaggcctatgatgggatgggctgccacaaaagtctgtgacatggctggagacattttctccactgtcttagggcttaacattcagctccttgttacttatgcaaatttctttagccagtctgaatttctcctcagaaaacaggattttcttttcaatcgcattgtcaggctgcaaattttccaaaccacttcccttataaaactgaatgccttgcattacttcccgttttcacgatctgctgctcgtctcaggctcgtagttcgccttcaacatgccggagccagcgaagtccgctcccgcgcccaagaagggctcgaagaaagccgtgactaaggcgcagaagaaggacggcaggaagcgcaagcgcagccgcaaggagagctactccgtatacgtgtacaaggtgctgaagcaggtccaccccgacaccggcatctcctctaaggccatgggaatcatgaactccttcgtcaacgacatcttcgaacgcatcgcaggtgaggcttcccgcctgccgcattacaacaagcgctcgaccatcacctccagggagatccagacggccgtgcgcctgctgctgcccggggagttggccaagcacgccgtgtccgagggcaccaaggccgtcaccaagtacaccagcgctaagtaaacttgccaaattgatgcctgcagctcctggggaaagtggaagtcagataactcctttatgaaaaggcagcattcaaaaactataaaaaatataaatccaacattattaaaattttgcacatccaaagatatcacgaacagttaaaaacaaacccacaaggtgacagaatatatttgtcacatactgacaaaaagttaaaactcaaatatataaagaatatttacaaatcaaatctcataaaataaaaactgtagagaatctgaatagaccattccaaggaaagtgggaaaatctccaaatagccaaaaatctcatttagaaaaactccgatttcacattaggaaatgctgataaacaataactctcaagcactgctggtggaatatgggagtataaatttaaaatactaccctggaaagcaaattgttcatttttattcatgttgaatatgcacatttaccaaataattccacttccatgtaaccagaaaatgcacagctgtatacagtgctgttttgtaatgaggaaaaaaaatcaacagagaaatgaataaagtatttactgacaaaaaaaaaaaaaaacaaaactgaatgcctttaacagcacccaggttatctcttgaattctttgctgcttagaaatttcttccaccagttaccctaaatcatctctctcaagttcaaagttccacagacctctaaggcaggggcaaaatgccaccagtctctttactaaaacataacatgacaagagtcacctttgctccagttcccaacaagttcttcatctctgtctgagaccacctcagcctggactttattgtccatatcattatcagcattttggtcaaagccattcaccaagtctctaggaagttccacactttccctcattttcctctcttcttctgagccctccaaactgttccaacatctgcctgtaacccagttccaaagtcacttccacatttttgggtatcttttccgcacaacccactcctggtaccaatttactgtattagtccattttcacgctgctgataaagacatatccaagactgggaagaaaaagaggtttaatagacttacagttccacatgggtgggaaggcctcacaatcatggcaggaggtaaggaggagcaagtcacatcttacatgaatggcagcaggcaaagagagatcttgtgcagggaaactcccatttttaaaaccgtcagacctcgtgagacttattcactatcatgagaacagcacaggaaagattcatccccatgattcaataatctcccaccggttccctcccacaacacatgggaattatgggagctacaagatgagatatggggaggggggggggacacagggccaaaccatatcaccaaccaaaactaattatctgattctctaaccaaggagagttattgagctttaaacattaaaacagatcagattcacatttaatattgccataggaacctttgtattaaagtagcaatttgagtacatttagtgctatcatataagaacaatactttcataggtgatgtttacttctgccctttttatgagtgaccctcacccaagtgcagtggtcttactgctgccatctgcaatgaggggaacgagttctggagggttcaatgccttgccctgtcttatctaaaagggctgacaaacagtgaaactaacacaaaaaggcaacatgcctgtggaaattgacaacaatccttgacacacaagcatgggaaatgggagggcaggtgtgctttcagcctgttcttggagaacatttaaactataaaaagggcctttgataaaaacagatcaatttcaaggcaaatcgacaaaagtactgaccataagatccgttaagttacaattagaacataatttgattgttaaaatcatatctattaagatatgcttatgtaaaacaaaagaatcccttccctggagaaaaattatctagctaattcttaaaaaacaatttagagattacaaaaagaattccagccaaacttctcaaaaaaaaaaaaaaaaaaaaaagaataggtagctgccattgtgtggaactaaggagaatgaagagaacaagtaataataaactgaaaagtcctccacagaagaaaacttctctccaccaaaatcaaatattcatcaagaatctgctaaacaaaaaaaaaccatccagaagaaaactggtctctccctcaataattcaatatggcagaagagagtgtgggctggcagctgttcctcccttgctgtgaaaactgcctatcccttccacagagtcctgccctatgaccaacatctgaaatggaaacagcccaggaggtctccagggcactaccctttcaccagagtaccagaactcacagaaacccaaagtttgctctccccttcaaggcactcagctgtgtgtgtgatgaggtgttatgtcttcatcctcaaaatactgtcattgttcagaacatttttggaactcctcctagaattaccttcaatctgtgagccacacacaaacatcagtgttaccatctgagattctgacgccacctcccaatcaggattctaagactgagagtgtcttaaaagtcacgttggtggccaggtgtggtgactcatgcctgtaatcccagcgctttgggaggccaggaggtcaggagttcgagaccagcctggccaacatgctgaaaccctgtctctactaaaaatacaaaaaaatttgctgggcatggtgacacatgcctatagtcctaactactcaggaggctgaggcagcagaatcacttcaacccaggaggtggaggttgcagtgagccgagatcgcaccactgcactccagcctgggcaacagagtgagactccgtctcaaaaaaataaataaaataaaaaataaaagtcatgctggctactgtgagcttcatttatgagccactaatgatggtgaagagaccaagtggctcccccaagccccactcacacagctgggccctctcacccgcccgcctgtaggcttacctgcccagctcagtagcacaggacagtccccagctgcatgtggaaacactgtttccatttagccctggaggacactgcatcttcccggctttcctccgacctcacctggctgttctgtgctccctcatcatcttcatctgcactgaaaatgctggccccacagcttcatcctcagccctatatcactccctcagcaatgcagtcccctaccatggctacaaataccttctacactatgatgattcccagcaccagctgttcctctggccccgactcctaacattcccttcttatcctctccagcgacactggcctttagtcactcctacaatactcctttgcccatagctgcctcagacccttcccctgccacccttggcctgtgatgctctgctcaaagatctcagcacaggctgtccttcgcttccttcaggtatccactcaaatacccaaaagagcagctccgcccaacactctctagcctgctcctcatgccactccatttttatttgcattactatatgatatatgccattatatttgtttactatcaagtctcctcacctgaatataagttccatagggaaagaactctgtcttgctcactcctgagcctgacaactataacaaatggggctggtccactccctgcattctgacccacccgagtgctgggagctcaacaacaatggtaataaacaggccggcccactccctgcagactaactctcatgagtgtactccaagctgaagcgcaccctcccacggcaccatccccagccagggcaggttcagcacgctggctcggcagcattgtctgaagaggggacacaaagctccctcactgtattctgtggaagacaaaaaagaaacacaactgctctcttaccaagtccttactttcttacctagttagggatttttctttttttttcttttttttttttttttttttgagaccaagtctccctctgtccccaggctggagtgcagtggtgtgatcttggctcactgcaacctccacatcccaggttcaagcgattctcctgcctcagcctcctgagtagctgggactacaggcgctcgccaccacacccagctaatttttgtatttttagtagagacagggtttcaccatgttggccaggctggtctcgaactcctgacctcaggtgatccacctgcatcgccctctcaaagtgctgggattacaagcatgagctaccacacccagcaagggattttacaatgaaacagtttcagaaggtacaactatgactctatttgtaatattcaccatgggatacagaagaaggaatgatcagacttgaggacgtgaaatctggaaaggccctctggaaggtggtttcaagctggattttgaaggtataggaacataaagtatctacccatttaaatgattatgagatggagtcataaaactttatatagtaggctattttatatttctgacttttttctttccaaaaagatgctattccctcaaccttcacagtaaattacaactcccttataatggaatgtaacatcttggcttcttccattagctcatctgtttctcaattacactctggcaacagattcctcacttctctctttccaaaatcgcttctcaactttttcaacatgatactgtagacaacagatcacacacagaggagaagtggaaaaggtgttacttggcccagccaggaatttgctccttttctaaaatatacttgcatggcagatgggtcagctctgatacatatgcagagcctgaatcacaaccagattagtcccacttccacacatgtcaaaatacattaaaataagcagatgtcagtaaccataacagaaataccactggcaaacagaattctcagaattcctcatctattaaaatgaaggcaacacataatttttacgtttcaaattaaacgtaggtttaatttataaattcggcatggcacaggagaaaacacacaagctgaggtagagggtttatagtcaggggccaggatatgaatgccaaatggggtactgcctaactgactggccttggcaagtaaatctttcacattctctgagcctgtttccttgtcaatataatacaaagtacatccatctcaaagagttttatacagcacattgtataatacatgtaaaacaagtacaaatgtaataataactattagggctctcattggctactctgcttcctttggccatgcagattatcacatacttatggcctgaaagaattaccttttcaagaattaccttttggtttggttttctgggaagttcagtttatggagaatacgttttaaatattagagtttgtgtcagcaaatatgtttttgtttattgtgataacacaatgtgggacaaagcaatacttacgtcccttactttaaatatatgtacatatgccattagtcatgtatactgaattatttgtgtatatttaaaacaaagacatataagcattctcttcatcgcaaattagatcagaaatcctccagaggtacccagatacaaatgctgtccccacaaagtccacgaagcctctcccctccacagcactctgtggaagcccctctgctttgactcactcctggacagcccctccgccctctgtccacgcagctttgccctgacactgtgtcatttcactcctacctgctgccactgcatacctcgtggggccctccctccgtgcttgtcatccctagccttccttcaatatggcttctagcaccacaatgctactggttctgctttcttcaaggagcccagacatctggacactggctctcggggcctctactcagtcctcagcctcttggtcttgttttctgctccttttccaggctctcccttcaccaagcaactccgaacccctcagcaactctgccttccctttctataggccagggggagtgtgcggcggctcagcccctctattcactgccaccctcatgctctaccctgaagatggaatcaattctgcttcatatcatagctcaaaatagagctctctcagattcacattttgagtctgtttctctcctgaaaagctctcacctttctgagtccaaacccaacaaggcaatgtgaggagtgtgaacagagggacacggtgatgaggatgcccagggttgaggccagaggaggtcagatcatggaccctgaccagagccccttccggttttcagtggggatgtcagtggtgtaatccgactgtgaaagatcagtctaacaaaacagcggggagagagagggctgaatcagagcgactaggtccaaagccgagggaaccaccaacagatcccctggtgacccaacaagaaatgctcacagtctggacccaatcagagtctgcaggacacagcagacattctggaagttacaacagccaggagcaagaggacgcatggcctgactggacctccacagtgggagtgaagggaaaggccaggcttgggggaggagaggggataccatcagccaggatgtgcaagagagaacacagggcgagccccaggggaaacacgacatgtccagctctgggagtcacgaggtggctgtgggaggtccatgtgaaggaaaggcacaggcactggatgtgctagcccagcgcttgggagaaagacttgggcttgagttagatacttcagtgccactgtaataaagaaagcagtgacagtcataggtgtagacgtgactgcccggagaacatgtaagcttggagaagtggcctgctgtggacaggaccctggggcaagacgcaccctcaggaaagcaggtgagggagaaacagaggtgtgaagtgcagcagagagggagcatgtgaagttgcccacatttcctacatccagcacaagcgcacacagggaaggcccactacaaagccagtggacagaactccctagggcttcagcagcaacgcctcctctccagctgctccctggcactcaggtgtccgagaggacaaggacgagtgctgctgagctctctcctctctgttggaaaactaaccaatgatgtctggcaaaaatgacagctgcagatgctgccttttccaacgagctgtcttcagagtcagagccctctgaaacacacacacattttcctgtatttgacagtttagcaaagtgaaaaagttccaatctttggggcttagatgttcttggtatctttgacttttcttctctatgctataaaacttttggattacacccaaatcaattctactttcacaatgctaaacaatgacaaaacacactaagattggagtatagcaatgaacagtcattaaatctgtgagagtgagaagtttcccttgttctacaacactagcggtgcacctggtccttacgaggctctaagtgtttggtgaatacatgaatgagcccatgagtgagtgaatgaaagaacgtgtgtgtccccagctgtccgctgccacggctctgcatgggtaagccaagcatggtgctctggaatcagaaaaagcagggtttgatcctggctcccctgtctactagctctttgaccacagaagagccacctttctaatgctgctgcccagtgtgacggggggctgacgctgcccacttcccattgcagctgtactgccgagccagctgtgtggtgggcccatggcggggtgttccattcacagagctacagggacagcctagaggagcccaaggctccccttgagaactgtcaacaatgctaccatctcagagtgaaactaggaaaacccacagacttagaatgtacataattagaaatcttggaaaataaattagaaatccaaccagtaacatatgaagagtcctgaattacccaaaactctaatcaaaatgaccctgctgtaatcttcagaaggccagaccaaaacaccttcgttcatgtgataaatgcagatcaaacactgctgcttccccagctctgggtcacaactgagcacagggcaatgaccaggacttggtctctgccttctccctcacaggggacagacaaactgtgctggtggcgtcctggggggaaggccctgtgaaatgaaggggcacctggcagtctgggggagggtgtggaggacagcacaggaaggggtcatcagtagagctggcactgtgctgggggagggtgacacctgggcatctcggggctcatctgcatccagctccccacttccttccactttgctcgattcccaacctttcggggcaacctcgtgatgagtagtttcgtttgctaagtcgttggaaactaggaagaagtcatcttgtctgcatgggacaagagcatcccagtcactagtgaagacagcctcgaggccaagccatcgacgggcttctgctccatgagcctctgtgagtgagcagggcccgaggcagcctttcatgaccaagaccactgtggcgctctcacagggggaggaggccagaccacaggcccagcaggatctcttaccagactgccagcatcctgccttcccctggaaaacagcacagctacatcatctcgccctttcaacctacaactattcaatttagcacttaaatttgaaacaataaaaaaatcagtcagttgccatgcactggctgactcctctgaagacatcagcaaatctacacgttgggtgattatcttgggagcaatggttcctaaacctttttttgagtttcagccctttttctttttctctttttttttttgagacggagtctcgctctgtcgcccaggctggaatgcagtggtgcgatctcggatcaccgcaagctccacctcccgggttcacaccattctcctgcctcagcctcccaagtagctgggactacaggcacccgccaccacgcctagctaattttttatatttttagtagagacagggtttcaccatgttagccaggatggtctcgatctcctgaccttgtgatccgcccgcctcggcctcccaaagtgctgggattacaggcttgagccactgcgcccagccctaagcactttttcaattctggtaaaagctgtggcctagtcctccccgaccccaacatccacgacgcacactgagaccacagggcacacagggccgccctccatggggagcagctgtcctcgaggctgatcttgcttttccttcctctgagacggcttcctctcggctcagcctccttgggacgggggtgccgtcaacccagctgcttcctcttctctcccgatgaagggatggctcaaaagtgccagcagcacgagccatggcagacacacagctcagggcctcaggctctgcttccttccactcccaggcctgacagaacccacagggctcaccgcatgcgcacaggcaaccagggcacaggagcagcagggccttccctcccctcctgctgctcacgcagctcctgctgtgcttttcaggcagctccttcatgtcttattcccattttaagaaatggaactcaaaatgtttggacctccgggatttggaattcctcaaatgttacaggatatttatatcacagttctgataacaggtgcactaagtcagccacaaaagttacagaatatgaaaacacgacgctccactgggctgcatgagcatgctcgcctttcgaggtgacgcagcctcatcccttcatgctgaaagggcaatttattttgaagcctgcacatctccgtggaaaaattcataaacctgtcacagagaattacacccgccacctaagctttcagactccctttaaaaacttgagaagacactgtagctcttcaattgcaagaagtggggagctgatacctaacactgtgggacaaactgccggcctgattctttccagaaggagaggatgataaaaataacttacacttgactagcaattcaccacttacaaactactttcacacatattactgcatttttactttgggaggaaagtctttagcccaaaagaaaatgaaacacactactgttgagtaatcctgccaaataaataggaagtgcatcttaacaaacccagctggacaacagcgtgagctaatgttaggatcccactatagactaaaaaactcctaaaggtagctttcttcctatttatagttaaaagaatagccaagattagtgcacactaaaagacagtggtaagtgctaaggatatttaaaatatcattcaaaagtcggccaggcgcagtggctcatgcctgtaatcccaacactctgggaggctggggcgggtggctcactgaggctaggagtttgagatcagcctggccaacatggcgaaaccccatctctactgaaaatacaaaaattagctgggtgtggtggcgtgcgcctgtagtcccagctactcaggaggctgaggcaggagaatcccttgaacttgggaggcagaggttgcagtaagccaagatcgcgcaactgcacgccagcctggatgacagagcaagattttgtctccaaaaaaaaaaaaaaaaaaagtcatttccaaattctcatattcaacagtatgtaatgatatcaatctcagatgtgaggccatcttcctgggccaagacatcagtgacttcaatttctaagtggaaaataagtcaatggtttcctatttgttttgtgagttcctaattgtctgcaagccttaaacttgtctataaaccatgaatttaagtcatttccacctcttactagtcattactagtggttacacagagcctctacactactaagcctcagtgtccccacatataaactatgtctggcataaagattacaccaaatcccataaggaaaggctctagtccagcagctgtcacatagtaaatgcacaagtcaacgtgctatattcacgtttgcttccattgctgttcatgacaaaggcgccagtcatgtacagtctacacaacactatatagaaggcaaccctccactaccacatcacattgatgaaaagcttgccttggtaacactaagcattttaaaggatgacacagttataatcttctgtattcctacaaatacgctgcaaaatcttgaaaaattaaatttgtctaaaggtcttaaaacatgcaaagtgaagtgaaacatggcgaatttcagtttttaaaaactttcactgaacattatttgaagccaaattaatgctttagttatgctcacagacatcctcaattcccaatttcacttattattaataacagctatcattattaaagaaattattcagctaaaccatgtgaaattgtcattttcattggtctaaagtggataaacactggcaatttcatgtggttcaacctaagcctatcaccagtgcctgtgctgggtactctatgtaggtcaacgaatttaattctcgtaattgctctgaagtgatgtcagcgacaccattcttcaggtggtcaaggagcttgccccaaacccacagctgacatgcaggttggcactccaccaccccatccctcgacctccacttctcaaccacatgcagggggctctgttcacctctttatttgcatttggtgtcttcacattttaagaaaaccaaagcaagtaagttggtgctggcaggatatgtttttaagaaaatgaagatgttacctccaattatcacgccttctttatttccctttattctgcatatcaataaatctggaattgacttaggacacttagtgactgtattactacagaaacagtcaaaatacttcaactggaagtacaaaatacttcagctaaaagtacaaaacttcagctcaaagtggcttaaacgtaatcacatttattatttcttaaaacgagaagtccagggctggatccaatgtctcaattatgttatggaaggcctgggttattttctctgcctgccccaacagcatcaactgtaaggctggcattcggggccacaggcttcctcattcaactccagtgaagaagtctctcccccatcccttggatctggatgtagctactcaggtcatgtgcccacctctggactgtcaggcctctgagcccaagctaagccatcatatcccctgtgacctgcacgtatacacccagatggcctgaagcaactgaagatccacaaaagaagtgaaaatagccaggtcctgccttagctgatgacattccaccattgtgatctgttcctgccccaccctaactgatcaactgaccttatgacaatacaccctccctgcccttgcgataatggactctgtgatattcccctgcccttaagaaggtacttcataatattctccccgcccttgagaatgtactttgtgagatctactccctgcccacaaaaaattgcttctaactccaccgcctatcccaaacctataagaactaatgataatcccaccaccctttgctgactccttttttggactcggcctgcctgcaccttgttgctcacacaaagcctgtttggtggactctcttcacacgaacgtgcgtcacatggaccatgcactgttggcagaaggatgccctgcactgaccaccttatgccttgagccctaaacccatcaccggcacacagtaagatggctagggctggctcagaccatccattttcaaccctgtctcacattaggatccttcagagagacttacaaatcctgatgcctgggccctgctccatactcctgcccaattaatacaatctctagggatgagattccctagagatgtgtgtgtgtgtgtgcattctctttttttctctctctctatgaaactcccttctctttccctgagtcatatgatccacgaaagggaggatggagcccggaataaagttggggttctgttagaaatgaagaaagggaaaaagggtgcagaacaagccatccatggtgtccattctacacagacacaaccaaatcaatcatgaagaaaggcaacataggtccttctccatgctgcgacgagctcggcactgtaccaccctcatcgctctctcatggatggctctgtgttgcacaacacacaggtgataaccttagcatgctgtcactgacacaactataagaaagcctctgaagggtcctacagccccacagaatgtaagcagaggtctcctacacagcctcccaggttagatggggctagggcgcctaccctgtgctgtttctgggctgaagctgtgtggctgtccagggccatggctgtctgctccacccaggtctctgtggcctggcagggcactctggcttaggaggggcatgagccagaagagaagactagttgtgtaccttccagcccggccaggaccgcctctgggatgtcaggactttgacagggcccaggatgtccaagtttttcttaacaatttcagcacttacacaaatggtatatttgtatccaagaaacataacccacaaatatttgacaaatgctaactccccaattttcatctcctaaagggtttcttttgacatctgaatagaaagggtttccaagacattatgtaactaagattgtcatcagttgactgtatgcacagctgggaggcttacaaatcatatggaagatttcattagctgcggttttctaatctcacaacaacaatcctaaacacccagatccttcatcaatgagttaatgaagaacattcgacgacatcttttcttaaagaataatgaagaattcatgcagagttattataaaaattattccaatatttgtggcttacagtaaaacaaacaacaaaaatggagcaagcattatattttagtagcctactttgatgccacagatgccaccgtctaaagatgaactgcaggggacggtgaactcctagcccaagaaaatatgaagaaagccacagtgtattttgaagtaaaatagttaattcttgttcttatttttcattttagactgaaatcctgaaaattagaatctgattacccttaatacagacacacaaaactctcctttcaccaacaaatccccaaagcagcatcaaccttactacccgcccctctttcttctctgctcattcctcctaagccacccttgtgcctgaccctgtgctctatgggaaccttttcagagttcatcaataactctctgttgccaaatgcttctcttcactcttgttttctttgagttccgactctaacagccattgtattcttctcaaagaaatggtttctgtccctctttttaaaatgtataaagcatttccaattgctgttccactcaattctcacagccaccctgttccaaacagacaggaacagtgtttatatctctattttgtggatgacagaatatcatggaagtgaagggactcacccagaatcacaaaccagaatacaggaggagaggggccagcctgctttctgatgcctcgacctgtctcctagctcagggctctcatgagccctacatccctctgctcaggcctctcggccagcctccccgtgtcatgttccctacactgccagtctttctgtttgtcacctttttcagaatgactcccaaacccatgtcactagcaagtttcttgtgaactctaagcttcttgtctccaactacttcttggacatttccatttggattttttttactatgtcagactgaccatgtcacacaccaaattcatcttcatgtaaactcactcccctttctcaatgtgcctatgagttaattgtatcctgaccagactacactaaagtttctattgcgctcagcttgtcagactggacatatgcaggccaaatgttttttgacatcctttgacgtacgaagtggccatttgaccactcaattatatcaacagtgaaaaatcaaacatttacattatgtttcttgttaaagttatcatgtaagcattgattaatcaaagaaaacagtcccagcattctcttgtggaaaggctgacacctttgttctattggacattctgaaggagaagtttcaagtcaataatgtttgagacattttttaaaagataaaaaccacattttgtagtagctcacgttattagccccgtgtttacactaaaaggctcaacactgggctaacgcaaaactatcaagagaaacacttgaccaacataataaaacattcacatgtaaaattctttgtcggtgaagatcttaaatattttgcttttctatcaaatggccatccacagctcacataataaagaagttgcttactagaatcataacatatacagtattctgacaatgccacatatttgggttgaaaagaattatgaagacacatcactgaatattcactagttactaaaccctctggcctttctctgtgttacgtgatatagccaaatgccagacactgaagggaatcagatgccatatcagaaggcaactggtgccatggaaaagatgtggaatcaaagttgggggagtgggcacactgccctcaagggaaggaagatgatgcttaagttagcttaagaaaggtaaaaggcagccggacgcagtggttcacgcctgtaatcccagcactttgggaagacgaggcgggcggatcacgaggtcaggagatcgagaccatcctggctaacacggtgaaaccctgtctctactaaaaatacgaaaaattagccgggcgtggtggcaggtgcctgtagtcccagctacttgggaggctgaggcagaagaatggcgtgaacctgggaggcagggcttgcagtgagccaagatcacgcctctgaactccagcctgggtggcagagtgagactctgtctcaaaaaaaaaaaaagaaagaaaagaaagaaggataaaaggagtcacttatgaaagatgctgggataactcaaaatctgaggaaaagctatacagcccacctggacagggataaagctgactgcaagccatagggctcctctgcatctcaggtcagcatttatgtcttggcttcagcaactgacaacacagataaattttctccaggtggccaggaacacggccacaggcagctctagagtcacatccaatagtttcacggcccaagaaaggcaaaaaaaacactgttcttcagcagctgaagccagaaaactcctggagaaagactatggcccagctcagagcacacacccaccactaaaatcactgctgtggccacagccatatagctggcactgccaagtctcaccttagccagtggtcagaagggtctgtgctgcgggagatgagggcctgctgagggagatgagggcctgctgaggggccctgctgtgggggatgagggcctgctgtggggaatgaggccctgctgtgggagatgagggcctgccgtgggggatgagggtctgctgtgggagatgagggcctgctgtgggggatgagggcctgctgtgggagatgagtgcctgctgtgggggatgagggcctgctgaggggccctgttgtgggggatgagggcctgctgtgggagatgagggcctgctgtgggagatgagggcctgctgtggggaatgaggccctgctgtgggggatgagggcctgctgtggggaatgaggccctgctgtgggggatgagggcctgctgtgggagatgagggcctgctgtgggggatgagggcctgctgtgggggatgagggcctgctgagggagatgagtgcctgctgagggggatgaaggcctgctgagggggatgaagacctgctgtgggagataagggcctgttgcgggagatgagggccggctgagggagatgaagacctgctgtgggggatgagggcctggtgagggggatgagggcctgctgcaggagatgagggcctgttgcgggagatgagtacctgttgagggagatgagggccggctgagggagatgaagggcctgctgagggagatgaagggcctgctgagggagatgaagggcctgctgagggagatgaggacctgctgagggagatgaggacctgctgagggagatgaaggcctgctgaaggagatgaaggcctgctgagggagatgaagggcctgctgagggagatgaagggcctgctgagggagatgaggacctgctgagggagatgaggacctgctgagggagatgaggacctgctgagggagatgaaggcctgctgaaggagatgaaggcctgctgagggagatgaagggcctgctgagggagatgaagatctgctgtgggggatgagggcctggtgagggggatgagggcctgctgcgggagatgagtacctgttgagggagatgagggccagctgagggagatgaagggcctgctgagggagatgaagggcctgctgagggagatgaggacctgctgagggagatgaaggcctgctgagggagatgaaggcctgctgagggagatgaggacctgctgagagagatgaagggcctgagggagatgaagggcctgctgagggagatgaggacctgctgagggagatgaggacctgctgagggagatgaaggcctgctgaaggagatgaaggcctgctgagggagatgaagggcctgctgagggagatgaagggcctgctgagggagatgaggacctgctgagggagatgaggacctgctgagggagatgaggacctgctgagggagatgaaggcctgctgaaggagatgaaggcctgctgagggagatgaagggcctgctgagggagatgaagacctgctgtgggggatgagggcctggtgagggggatgagggcctgctgcgggagatgagtacctgttgagggagatgagggccagctgagggagatgaagggcctgctgagggagatgaagggcctgctgagggagatgaggacctgctgagggagatgaaggcctgctgagggagatgaaggcctgctgagggagatgaggacctgctgagagagatgaagggcctgagggagatgaagggcctgctgagggagatgaggacctgctgagggagatgaagacctgctgagggagatgaggacctcctgagggagatgaagggactgctgagggagatgaagacctgctgagggagatgaaggacctgctgagggagatgaggacctgctgagagagatgaagggcctgctgagggagatatgaaaacctgctaagggagatgaggacctgccgagggagatgaagggcctgctgagggagatgaagggcctgctgagggagatgaggacctgctgagagagatgaagggcctgctgagggagatgaggacctgccgaaggagatgaagggcctgctgagggagatgaagacctgctgagggagatgaagacctgctgagggagatgaagggcctgctgagggagatgaagacctgctaagggagatgaggacctgccgaaggagatgaagggcctgctgagggagatgaagggcctgctgagggagatgaagacctgctaagggagatgaggacctgccgaaggagatgaagggcctgctgagggagatgaagggcctgctgagggagatgaagacctgctaagggggataaggacctgccgaaggagatgaagggcctgccgagggagatgaagggcctgctgagggagatgaggacctgctgagggagatgaagggcctgctgagggacatgaagacctgatgagggagatgagggagtcccaatatctgcagtccatgcactggagactctggacagccaatgtgtagtgccagtgtgaaagccagcaggctcgagacccaagagctggtgtttcagtttgagttcaaaggcaggaaaaggcccacatcccagctcaaacagtcaaggcagagatcccttttattcagcctttttattctgttggggctccaactgactggatgagagccacccaactggctgaaggcaatctgctgtactcagtctcctggttcaaatgttaatcttatccagaaacatcctcatagacatacccagagttaatgtttggccaaatgtctgggcatctcatggtccaatcaagttgatataaaaattaactctcttagggaccacctaggtggcttgaataaaagcttcaaacctgcatgaaaaccagcctactaattctcagaagagattttccccccactacactcaatgccaaaggtcaaaacaattttccttaaaaaactttcggattaagcgagtatcttcagtttaccccgacactgctgggaaagacccttgggagtttcctctcaggatgctcacctgaggtgggaccggggctttgtctcctatcccccacaccctgggagccatggaaactaaaggacaagtttgaaaaataccctcaaagcaagaagttaagttctctgttaacctctctgtcctcccactttcacttgactttcatgctctaggtataattttatttaattatttatttatttatttatttattttgcggccaggaacagtggcccacacctgtaatcccagcactttcggaagccaaggcaggaagatcacttgagaccaggagttcaagaccagcctgggcaacatagtgaaacctcatctctacaaaaaaatgttgtaaaaactagccaagtatggtggtgcatgcctgtagtcctagctactcaggaggctggagcaggaggatcccatgagcccaggaattcgatttacagtcagctagcatcactccactacagtccagcctaggtgacactgcaagacactgtatcaaataagtaagtaaaatgtttttttgtgtctcactccgcattttgactgttcagtaaggagaggtggtcagggatttttccatcatacccctggctcccagttcatggcctggaaggatggaacatagggagacctataggaagctctcaacccaaggtgatggtggctcaaaactgggtgggaaaattagctgggcgtggtgatgggcgcctgtaatcccagctactgggaggctgagacaggggaatcgcttgaacccaggaggcagagggttgcaatgagccaagactgtgccactgcactccagcctgggcaactgaccaagactctgtctcaaaaaaaaaaaaaacacctaggtgggagtgctagctggtgatcagattctggagatgttttgaaagtagagccatcaggatttcctaacagactgaatgagggcgtaagagattaaaaggagtcaaggagtcaagaatcactcgaaggttttttaaaagtctgagacactagaaaaatagaattgtaatcaatagaaattagaatttggtgtgagggaagattaggggtttagtctgaacacattgaatgtgaatgtttattagatgtccatgtggagatatcaagtagacagctcaatctatgaggctagagctcgggacagaggtctgggctgaaggcacaaatctggagaacctgatcaatgctttgtgttactcagacaagccaaatagatgtaagatggaaataaccgcctatctgcccttttagcattgaaaacatggtaggaaatgcagtttcctgtgatcacaatactagtctgcattaacagttacgtaacatgtggccaccatctcaatacactctgtcctcgtcggctatttgctcgagttctatgccagttctgtggcttaagaggaatgtgaagaatgtggacaaagcctgggaaaaagccagccatgtagctgaacgaagggaagacaaatgaaatctagcaaacgttaaaggaaatgagatgatttagtcagggatgattaatagcaactggtctcgtactctgaatcagggaagtctagatacttgaaagtaacctgccacctttacagcaagcaaacaaaagaaaatgagttttcattgcagcatgagattttttttttcatttcaagtcttttatccctaaagcatgagatatttagactagaaataaaagaggaaaactagcacctatttaacacctactacattaggtgttggcctaaacactattgcattttaatatacattaagatccttgaggtagaaattctcattttatacatcagaaaagcaggattctaaaaggttaggtaagttcacaagcaggaaagctgcaattcaaatctgggttgaatgagtccaaagctcgtgtacttattaaaatacatcaaatttcttaacagaaattgataaaagtaggaactgattactgaaagggataatgagatcttttttttcctcgatcttatttttttttttaatgaagtttcactcttgttgcccagactgaagtgcagtggcacgatcttggctcactgcaacctctgcctcctgggttcaaacaattctccttttcctcgatcttttaaaaattagaagagcttcttatctgtccagtatattttcataaactagatctacctaaaaccaaaggaatagaagaagccagttttcaaattatctcttagtcctaagcagttatgattctagattctgaaaacagtctaaattctgaaaacagtcccactaccaccagcaccacgaactatttttgttcctattttcctattctatagtaaactatatattcaccttctaaaacacatatgaaattctataatttaagatttaaagtaatcccatacataactcaggagtcaaacatcctaggcttaaacagatcttgttttgtttgactttagaacaaatgattctaaagattctaaagtaagatgaccttgcaatggatttatgaggggttgggctgtgctcactgtgttgaaagaaccagtaattattttcacggataagaaagcctgggatggccaggcacggtagcttacgcctataatcccagcactttgggaggctgaggcgggcagatcacctgagggcgggagttcgagaccaacctgaccaacatggagaaaccgcatctctattaaaaatacaaaattagccgggcgtggtggtacatgcctgtaatcccagctactcaggaggctgaggcaggagaatcgcttgaagccgggaggcggaggttgtggtgagcagagatcacaccattgcactccaacctggacaacaaaagcgaaattctgtctcaaaaaaaaaaaaaaaaaaaaaggaaagcctgggatgatgtcccagaagcaaaaaaaaattgcattaacacaacttaacaagcacctcatattatccataagccaaagcttaagcaggaaaagtccacctgagtcaaagaacacactctctgatgagtggcagaaacttgggttgcttgctactgacagaactgcataaattaagatgaaactcattacaattttcactcacccccggaaacttccggaggaccagagctaaaagggccatagagaacatttaggctaaactcctctttttatgagaaagtaggattactggctgcaaattagcctaagtagagactggcatattgtttcagggcaactgacccagaagccaagcaaagccagacctaatgtcaactaaatgtgagaagtcatccagtactggcccggcacggtggctcacgcctgtaatcccggcactccgagaggccgaggcgggtggatcacctgaggtcaggagtttgagaccagcctggccaacatggtgaaaccttgtctcaactaaaattacaaatattagccaggtgtagtggcaggcacctgtaattccagctacttgggaggctgaggcaggagaatcgcttgaacccaggaggcggaagttgcagtgaaccaagattgcatcactgcactccagcctgggcaacaagagtgaaactccatctcaaaaataaataaataaataaataagaagtcatccagcactaaggcttccacccgagacatgtcctgctgagcagcagtcctgtagcgttgttgggaaacagggtctggagccaggcggtcggggtctcaaatctcagctccaccaccccataactatataaccttggcaccttactcacttccatgcctcagtttcttcatctatgatacagaaacagtatttaccttacagggtactgacagacataaatgtaacaaacgtaacacacttaaagccatgactggtactcaagaagtattaggtattcttatttaattattctctccctggcaccaccagcatcctctcccacagactgacactgtccgcttgctcacggcccgtaacaaccagcctgaatagttaccttacaggtcaggtctaggaaccacctctgattctatgattcttgagaggaaaaaagctgtctggtcaagtatccaaccctggtgggtaagtgttgtcaatggagtacaagcatagccccctggacctgccctcaaactgtggagggtctagggctttaccctacttgcaagcttgcaagctaacaagctagcatgctagagtcttacagacactggcagaagacacaaactcttgagtctgagaccaagaacttgttatagcaacagccatagccagagcatttatgccagtttaagacccaattccacaaggccacatacatgctgtgtgggctgtgtcacaggagaggaaccccaagctctggctgaactttgccctagagggaaacattatctttactacataagggtaaacaaacctaccctttttgctctggaaggagacagtatctctgtcctctaaggatgtctgctatacacacatccttgaaaagctagccagaaacaaaggaggtcagttcctctgctcttaacacatgaagaaacaggagtgacccttgtgtctcgacaatatctaaataaatgaagacatatacttgtgttcatggattgtaagtctcaatattgctaaagtgtcaattatcccccaaaatgaactgttgattcaacacaatcccaataaaaattccaacaggattctttttggtagcaagtgacgagctgatttttaaattcatatggaaaggcaaagggcttaaaaatagccaaaacaaccttgaaagagaacaaagttggacgacttatactacctgactttaagatttattataaagctatcaagatttattataaagcatggtattggcataatgatccaaaaatagatgaatggaacagaacagaatccaaaatgaccttcacatgtattgtcaactgactgtcaacaaggtgcaaaggcaattccctggagaacaaagtcttcaaaacaaatggtactggatcaactagatagaaagtcttatgcaaaaaaacaaagcaaacgataaaaataaaaacaacaacaacaacaaaaactctcaccacaaacagataccaattcaaaacaaatcatatacctaaacgtgaaatgcaaaactataaaactactaggagaaaacacattagaaaacctttgtgacactgatttaggaaaaaatttctacaacaaaagcatgcttcttcgaagaaaaagaattataaactttatcacaattaagataggtcttctgctcttcagaagatgctcttaagagaatgaaagatgagccacaagctgggaaaaaatatttttccaacacatttgtcaaaggacacaaaccgaatacataaagaactctcaatattcagtaagaatctatccaatttttttaaaataaacaaaacatacaaacagatatcatcaaagaagttacgtgaatggcaaaacatgaaaagatactcaacatcattagtcacaacaaaaatacaaattaaaaccacagtgaagtatcacggtatccctattggaatgtctaaaattaaagagaatgaccatacactaatacaatgctgctgggaatgtaagatggtacaagcactttggaaaacagggtggcagtttcataaaaactaacatgcacctaccacatgtctcagtgatcccacttctaggtatttacccaagacaaacaaaagcatatgtccatgcaaagacttgtacaagaatgctcccagcagctttatgtatagtagtcaaaagctggagacaacccaaatgtccatcactagctgaatgaatacacaattgtggcatatccacaacatggaatatttagcaataaaaaataatgacctattaatagacacatggatagacatggatgggtctcaaaatcaacatggatggatctcaaaataattatgctgagtgaaagaagcacggcaaaaaagaatacaaactatgattccacttatataaaatcaaagaaaatgaaaactaactacagcgcagaaaggaggcgagtcactctctggaaagcagggagaggagcaggaaggagggaccacaaaggggcacaaagtgcctttggaggtgatgggtttgcacattaccttgattgtgataataattttacaggtggacatttatatcaatacttatcaattgttcactttaaatatatgcaacttattacatgtcgattacacatcaataaagctattttttaaaaaagcattcaccaccaaatggaactgacactaaaaaaaagaggttaatttgaatcataaaaaaataaggaaaattaatttatttttatacatgggtgaaatgtatactcattaaacaacatatagtgttaaaaattatgatgaaattgggacagaactttaggttagattggtagttaagggtgaagaggaaaggatgcagtaaagatagctttttaaagaaattttaaaacacacacatactatacatgtgtacttctcttcatagctgcagtgtctttccaatttctttttacccaaattatttaacaatgggtcttctcttttatctgacagaaccacatacccacatagagtactgtgctgtaatagagaatgggataggctgatgctgtttacctgctgttttataagagacaatttctctttgtgttgtagggacaccagtaaattataaccaaattgaaagcaatacttcagaaacagaactagagtaaacttaacataccaagaaattttctaaaatttgactttttttaaaagaaagaacatcttacaatcaatcctactttctaatactttaaaatttccttcagctacagaagaacaggtatacagtaggcccctcttatccacagtttcaccttccacagtttcacttagccagtcaaccatggtctggaaacatcaaatggaaaaatccagaaataaacaattcttaagttttaaattgcacaccattctgcgtagcatgatgaaatctcatgctgccatcccactccatcccatcagggacatgaatcatccctttgtccagcatatgctatgcgccctttaggtcactcagtagctatctaggtcatcaggtcaactgctgtagtaccacagcactgttgtccaagtaacccttattttacttaataatgaccctaaagcacaagagtagcggtgctggcttattattataattgttctattttattattagttgttgataacctctatgcctaattataaattaaactttacatacagatgtatgaatgtttaaaaatatagtatatagagaggatttggtgctatctctggtttcagacatctactaggaaacttggaacgtatgccccgtggataagggaggactactgcataacccgtacaagcagctggacagataaccaccccccttaccactcaaaagccaccacagcaaagggatgaatcctggactctcgctgatgtatttcaagcctttcaaattgatgcttacattgtatagggacatcagcattagcctgaaatgtaaaagaaaaaggtgttggaatgctccatccacactacatttcaccctaaacatacctactagttaagaggaacttaacgtatttagagcttccctcacattttagatgtccaattctataatgtgaattaataacatctgtctacgtgaggctacaggaaaatgggaaacttcagcaatgatatcacataataccgcctttcatagcctcacataatcaagagtctcgattgcagagagggtcccacgggaagcctcacaaaccatatttattgattcatttcttttattaccaatcctgcattaacatacaggttaccctcaatttgtaagagtactatactctcaaagttcaattcagccatctaaaacctaatgacatattttcattcaatgaacattacgcatgacatccaggtagccaggtcaggccacaggactacataatcacagtacaaggaatgaagaatactacaacccaaccatccctcacaaccaacagagcagtttactgaataggacaggactttataagctgttttgggattgaaccgtggctggcaatgcagagtctgatgaaagtcagaaactacaggactttggtttctgcaaatactgcaaaatacagagaacccaaacactttacactgcagagcaataaaaaggctagacaaatattttttgcaaagcctttgaaataatgaatgaatttgcaagaaatcaaaggaaaacatctctgatcaggaacaaagtaagagcacaaaatcttagaggaaagtgcaaaagatgctacaattccaaaagactagagcttcagttacagtggcttcacgcagagggaccgagcgaaaagcctcagagagacacggacattcatttcacaggccctgcagaaaccagaagagaggaaactttcaagcttagcatgaattcacatttttggcaggcctgaaaaatccccaagccagtaattttaatataaaacagacctgggatagaagctcccccagcttcctggacattaaaggaaaggatcctcaacctggtcttcaaagaattcccacaaatacatactagcaaatgggagttcataacaaaaatcataatatgacgcatgagaaaaagaagaccaggtaagcaacagccagcacaaagaaccaataacagggctagaaccaaaaatttttcagatactagaagtatcaactgcagaatataaaactggtatgtttaatgggtgaagataattttaaaagaaattaaaaacataatcaagaagctaggattactattttgaatgaccagccaattcaaaaataacagcagaatgtacaaaaatgaaaacaataattaaaatgtaaaactcaagggtaattagacacatggaaaaggagaaatactaaacagaaaagacagcttaagaaactacagcaagaaagaaaaacagattaaagaaagataaaagtacaaggaggcaaaggtggaaaagttcaacattcttccaaatagggtccacaaagaaagaacagaaagaatgaaggaaaaaaatgtttcaaaaatatttcccagaaatgagtaaatataaaccctcagattcaggaggcacaaaaacatctcaagaaagataaaaaataaatacaaatctacacacatcacaatcaaactttagaaaattaaagacaaattttgtaaagcagccagagagaaaggacatattacctataaaagagtaattacaccaaaagctgggctctctatatctaccaagggtaaagagaaaataataataaagctagaattgtgaacccagcaaaaatattttcaacaaaagaggtaaagtaaaaatgttgtcaaagaaaatctcagacatttttaaatgtatctgaactgaaagaatttgaaggacagacttcagaaaaaggaaaatgacgttggaagaatgttctgagatacaaggagggagtaagtaaagggatgtgagtgtacagaagtaaacactggggggtaaaagcagtcattaaaatgtctactctatgggatttttgaaacttttcaacagagctaagatacagtccatgaatgcatataatccaggatgtaagtattagagcattctaagatccttctactgtttaggtgagaaagacattaattactttcaagtataccaaatacatcaaatcatgctttaaaaaaggggctatcactgaaagaaacaagggtaaactttcaagacactagaagaataaaatgaactcagaaaagatcttagtgactttgaaagaaagataacagagtaagaccctgttgaaagaaagaatagaaaaggaacgaaaagagaagaagggagagagagaaggaagaaagacggtgggaggaagggaaggagggagacagggagggaggaagcgagggagaaagagaggtagggagggaaagataacttggaaaaatcataataaaaagaaaaacaaaatatgacagaataaataaatccaattatttcattaatcacaaatgttaatgaacaggatactcctattaaaaggcatagattatagatggttagattaaaggaaaaacaaaatgcaaccatggactgtttcaaagaaacacacctgaaacaaaagtttccagaaaggggccaggagtggtggctcacacctgtaatcccagcactttgggaggccagggtgggcaaactgcttgaggccaggagtccaagaccaccctggccaacatggcaaaaccctgtctctgctgaaaatattaaaaaatagccacatgtggtgatgtgtacctgtagtcccaactactagagaggctgaggcaggagaatctcttgaatgcaggaggcagaggttatagtgaagcaagatcgcaccactgcattccagcctgggcaacagagtgagactctaaaaaaaaaagtttgcagaaagttgaaagtaaaagaatgggaaaagatatatcaaacaaatactaatgaaaaaagaagaaagagaaggctgaggtagctacattaacagaaaagaaaacagactgagtgcagtggctcaggcttatcatcacaacactttcagaggctgaggtgggcgggcagcttgagcccaggagttggaggtcagcctgggcaacatggcaagaccccgtctctgcaaaaaatacaaaaacagctgggcatgatggcacgcccctgtggtcccagctactggagcagctgaggtgggaggatcacttgagcccaggaggtcgaggctgcaatgagctgtgacagtgctactacactccagcctgtgtgacagagcaagaccctatctcaaaaataataactaaaaataataataatgttaaaagaagggaaagcatctttaaaaattaagaggctaatttttttttttttttttttttttttttttttttgtgaaacagagttagagtgcagtggcgccatctcggctcactgcaacctccgcctcctgggttcaagtgactctcctgcctcagcctcctgagtagctgggattacaggcatatgccaccacacccagctaattgttgtatttttagtagagatggggtttcaccatgttggttaggctctcgaactcctgacctcatgatccgcccacctcagcctcccaacgtgctgagattacaggcatgagccaccacgcccggcaaggctaaatatttcatactgaaaagttcagttcatcaggagggtagcattttaaacttgtatgtacctaataatatagcctcaaaaatacataaaggcacaaattgataaaactacaagaaaatgctgaccagtccacaataatggtagattttaaggcacctcttatagcacttaatacattaagctgattctctgatccaccacataattaagttaaaaatcattttttaagtaggttttaaaactccaacatttagaaaactgaaagtacatctctataagaataagtcaaagaaattatgaggaaaattgggaaactgaacaagaatgaatatacaaaaataaaacttgtgatgctagtgaaatacacacacacacacacacacacacagcctttaatacttattccagaaaaaaatagctgcagcaatggcagagtaacttgcattggactaaccctccaccaataagaatcacaaattctgaacaaaatataggaaccatttaaggggaatggaaagcagccaaaggcaggcagaaactgaagagaagtgcccccttgaaagaagaggggtggctcatgcctataatcccagcactttgggaggccaacatgggaagactgcttgagcccggagttcaaaaccagcttgggcaacacaacaagatcccatctcttcattaaaaaacaaacaacaacagaaaaaaaaccattagataggcatggtgacacatgcctagagtctcagctactcggaaggctgaggcaagagacttacttgagcccagggatgtcaaggctgcagggttgtgacggtgccagccactgcactctggcctgcgtgacagagcaggaccctgtctcaaaaaaaaaaaaaaaaaaagagaatttttttttataaagaggcaaatatattgaggtttagacaaggccacatagcaccaggcagcgaccctcaatcagaaacctggggatgaccagcttgagaagtaaaaccacagagtccagggtcaccagggtggaaagaaagggaagaagatacctagaaaggagggtttcagaacaagggagcactaaaatgtgcatgaaaaccctccaaggtcctggcctctaaatggcacaagtgtgaggcagagaaagagggagagctgcaaggcagaggaatgaggcacagctctgctgcagaccacatccagagagccagagctcaggtatgagtcaggcaaagctgacagccagctaggacacacataattcccttcaggaaaagataacagagtccagagcccccacaacctaccttctgccacctccagtacacatgctatcaaataaacactgaactagcacagccggctaggatgaggagagtaagccacttgctttgggtgtaaatttaagggagtatcaaaatgcccagtggcccatatttttaaaaatgtaatgcaatattttaaaaaaatatattaaaaatgccctaataagcaaaactttaattttttacttttttttcctagagctagggtctcactttgtcactcaggctggaatgcagtggcacagtcattattcactgccacctagaattcctgggctcaagcaattctcctgcctcagcctcctgagtagctgagactacaggcatgtgccaccacacccagcttattttttaattttttgtatgaggtcttgccatcttgccaaggctggtcttgaattctcggcctcaggcaattttcccacgtcggcctcccaaagtgctgggattacaggcataagccattgtgcccagcccaaaattttaaataaagatggaactggtcacatactggagcctaaggcaaaaggaaaaatcagtaatactgaccaagtccattataaagggactaactaaatatactatggtacatgtaacacatgcatgccatagaaaatttctattgtagttctctattaaaatctctggtttccccactaaactttgtcaaaagcaagctccgtgccttatctttatcatctcacaaactagtatagtaagactggacacaataagcactcaatttatctactgaaaagtgaatcaactcccagtgattaaagatcaaaatatataaaagctaaggtcttccttctcacccatgtgaccataggcactttctttttttttgtttttttgtttttttgttttgagacagagtctcgctctgtcgctgagagagacagacaggctggagtgcagtggtgcaatctcggctccctgcaacctccacctcccaggttccagcaattctcctgcctcagcctcctgagtagctgggactacaggcgtgcaccaccacacccggctaatttttgtgggtttttttgttttttttttttagtagagacggggtttcaccatgttggccaagctggtctcaaactcctgacctcaggtgacccacctgccttggcttcccaaagtgctggcattacaggcatgagccaccatccctggccgaccatgggtactttcaaagtccctggcaatgctctggagccagaaaagacagagctatgcaagcaccctccagaacagggtgctcagttctcaaaacaaggtcctcagcctcccagcgggctacaaaataagccacactgcaagttctttcaagtttcactgacaatttttacatgaattcaaaagctactcactagtaacctatttaatgaggtattaagggctactcaaatgtagtgttcatgaggaaaatttagcaccttaactagaattcagtgaggtgtcgaatccagtattccaagaaaagttcctgcttcagatcacaaacacagagagttggaattccttagaattaaatatattgcccaaggctgctttcacacaggcagtaacagcagaactgagtcaccgcaacagagatcgtacgaccccaagagcctaaaatattttctgtctgacactttacggaaaaagtttgctgacctctgccttacagcatgaaactaagataaaccaatcttctgtatgtcttaaaaagcaaagctagcatctggtaataactgtaatacagggaaaccttctgaaaagatggccagttgaaattctttgctgactgccatttagatttaaggtggcaaaaacaactcccaagttggcagatgtctttaaattttcatatttggtcaaaatcagttatccttaagaagctaaaatgaaacacatacttacaacaaccatgttgccacctgagacctcacgtcactgccaagatacatctcacagaagaccaaagacttctaggtcacacaagagttagcaaaaaataaacccaaaaaactgtttcttatgcaaatgtttcgtctaatataacatttctattccaaccaaaaatatttgtaaatagtgtatcaagtttccaattatcaagtctaaagagactgcccattcattttactcttctagtattgaaatattaaatgttatttcttggccagatgcagtggctcatgcctgtaatcccagcactttgggaggctgaggcgggcaggtcacttgaggtcaggagttcgagaccagcctggccaacatggtgaaacctcatctctactaaaaatacaaaacttagctgggcgtggtggcgcacacctgtagtcccagctactcgggaggctgaggcaggagaatcatttgaacccgggaggcagaggttgcagcgagccaagatggcaccactgtactacagcctgggcaataaagtgagactcggtctcaaaaaaaaaaggaagaaagaaaatgttatttctcaaactagtgtactaagtgttagactttttcttccaatgacaaaaaaaaaaaaaaaaagtaggcaaattctgcttcctgccacaaacctcagcagaaaacctgttatacatgggactaacaggctccaaaagagcaacttcccagtctctgcagtcttgatcatctaagacacatctgacatttaaaaggactgaaaatatggctaaaataaaggtactggtgaactcgaaatgctacataagcaacacgagtaactcatcttcgataaaaagcaagttctctttacctaaatatacaaggtctcagggctgaacaagcacaaggtgtgaaaagcaagaaagcactcctccacaggccaacacaactgagtcactaaaggtaaaagtgacaacttgaccaccttattcttcatcttaaaagaaaatataacttgcaacctacgagtaacagaataaacacgcccagtacttcaaaacaaactagcaataaaaataagcaagaaaaaggagtatctgtgaagttcactgctcagaaacaagccaatcagtgatgctaaactgaccaaaatctaaggtagtcaaattagcaccataaagtaattctactgtacaataagtaataaaattcttacaaaagactgcatgtaatttgagaaagcaattggcacagcaatattacatttttagaccaaattattcttgacagaaacttaagaggcctaccaatttttcattagacagagtacagtaagtaatgacttaacagactttagattctgtgcctctttcctcagtcaagttagaacctaaaaacctgtggtctatatcatgtcatcctcaaatatctgtatgtcaatttgtatctattatgttacaatgaagacatacaaaaagatataaagaataatacaatacccacctccctggttaagaaagaaaccctataaccagagttgaattcccttggtgaacgctacccaaaggcgtgcttcagggaggtgtaaccacagctatgtctgatatttaaactagccacgcattgctaatactttaggtatggaatcttttttctttgcacgtctgcatcaacagcagcatactgcaggcaatcttccacgccatggtgagatttgtttatgttgatttctatagctccaacctatttccactgatatatgccaactttttaactaatcacaatttatttatctgttctccatcttgtagacatttaggtaatttcctagtttgtgctattacaaacaccactgctataacattttctgtacaagcatcctggtatcctatggaaaacgttctctggagtacacatgcagacggggactctgtcctcggcatgtgcagacacagcctccacagacacaggccagctggctccacgtaccctccagcagcacatggacaggtgtaagcttcactgtggcttcacgtccaatcggaagcttgtaatcatcagactgtgatttttttttcaatgagaggcaccgaaaaggcatcttattagggttataatttgctttcccctgattactatggagagcaagaatctttcccatgtttatgaagctgctgcgtgttttattctataaattgcctgatttttttcttttgcctatttgtgtatttggttatttgccttttccttattgaaaaggccaaataagcaaattacttagctatacctgttttttcttaaaatgtacacagaatgaccaaactagacagggtaaaacccaaaaatgcctttcagaagagccgatgttcacagcaccatctaccaatttataactcaacagagaccaattcagtggctggtaagcacattgtagctgaaagctgtaccacctggaaataatacacattagttcacaggccccaaatgacttccagatattgacttttgttaatatctggaaatgatgaggactctaaacttaggaatttgaacattatctagatacagtttgtcttgaaaacatacttccttcattaggacaattaattgtaatgcaatgtcttaaaattatcttacaagatccctaatgataactttcctatctagagttactaaagctttgactggaaactggttagaaaccccatcatgtctgaagatttcttttcagccaatacttatgtgaaaaagggatcgggccaccaaaatgcacagtaacactctgtagaacttttaataacaaacaagggagaaccacacccagaaagtgaggatttgctctcactcatcatgcaacatttactgagcatcttctctgtcctggactccacactctccagaagtttacaggaaacgggagagagacaaacaaagcaactagtgaacaaagtgtggtacaagcttcacagcttcctctccacacttagttctaaaaggctgctattgtcttaagacattttgtggaaacacttctagaagcatcttcgaaaaatgcaatctgcactgtgactattccagacgaattctttggaaaacgggagcttgtgggtggctccaacctgcagatgcagccacacagctactccacagagaaatgggacgataccatcaccctcatttgcccacaaaggtgagctggttttcctgcagagctcagagctgcttctgaagtcatctgcacaaagaacccagaaactttcacaagccatactctcactgatgacattcaactggtaacacctggggaagatgctgggcaggataaaccaacagtaacttcgagaaacaggaaccacatagagcccaaactccaagaggcatttctgtaaccctctaccctgtgcctggatgagaaaaccttgctgagccactgttctcccacacatgccaaatattctctggcccattgacagtgaaatgcactgtgtcagttacctcagcttagtaaaagcagaggtgttctcatcacagacactacaccccaactggaaatccaaggagagggttatcctgagaaccaagtgaccattcaggaatgtgggtagctcccaccccagaggcctctctcctcactcgggatgaagaaccaccttaaactctgggccttctgccatccccttcaataacacctccagcaggtctgacctgagaagccgctagtgtagatgtgaaaaggcctttcatggcctactcaaggactggtaaaatcataggcagcgtgggcagtgaggaaaaaaaataacccggcctccataaggaagtacaaaaaaaggaagggaaactttaaacgctggagaaatccacaagtctaataaaaaaaataataattgcagttgcctaagtgttaccaagtatcaaggaggatggaaacgccagggtcatgtcacagcagcggagaaagaggagccgtagaaaggagactctgggccctccacatgcagctcagtgccaggacagcgctcagggccccccgcaatcccaaggtccaggcacagcacagatcctgcccacaccaggccctgggagcacaagcctgggtgaccagtggccggaggggaaggaaatggactgaggtggtgacgaagggggacactcctgacacatgtcattccatggctgaatgactaaggagaaatacacagagatgaaacagacagaaccctgccaggggcatgccaccagctgactgcactgaactgccgcagccttggctgacagagctcaccctgcacacagttctgtcaagtggccatctccagcagacacctgagaggctgatgggaatggggaaaattacccatgaggtatggctaagactgaaaagctatgaccactacagtaaacagaatccagtcatcctgctggcagcaccaaccaccttgaggggcctccaaggtcagctggtgtgtctggccaccatatgctggaagttcctagatttggagagttaaaaacagggtcttcacaaaaaaaggcagataaactaggaacagcccgaaaccatatggctggggaggctatgccactgaaaaaactcacagaggctgagtcacaacaatgtcccatgtacaaccctatgaatgtttgccacaaaagacatggacatgtggcccaatagcagaatccagtctgatccaccactgacctgcagggcccacagggatttctgggggaggcaaaaagaacacaccatgagccagctctgcattctgggaaaatgcaacatgtcatggtaaacgcaggctggctagtggtttgaaagggcagccgtggcctgggaagacaaaaggctaaacaggagccagtggagcaggagcgctggaaatactggagcaagaaatgacaggcaacagggcacatcccagaggaaggctcaacacagaggcaggaggattacacacacacaccacagcacacagcacacaccacacaccactcaccactcacacacatcacacataccacacaccactcacacacatcacacacaccacacacaccatgcacaaaccacaaacacaccacacacacacacatcacgcacacaccacacacacaccacacagcacgcacaccacacacacaccacacacactacacacacaccatacacaccccacacaccacaccacacacacaccacgcacacaccacacacacaacacacagcacgcacaccatacacacacacaccacacactacacacactatacacaccccacacacacaccacacacaccatacacaccccacacacattgcacacacaccaatatacacacaccaccatacacacatcacacataccacatcatacaccacacaatcatacagcacacacaccacacacacaccacacacacacaccaccacacaccacacacacactacacactgcactcacacgcatctcagacaccacatacaccacacacacaccactcacacaccatacgcacaccactcgcatgccacaccacacacatgccacactacacgccacacacaccacccacatcgcacaccacacacaccacacatcacacacaccacacccacacaccacatacacaccatacactacacaccacacacatcacacacacaccacaaagacacatcacataccacagacatcacacaccatacaccacacacacactacacaccacacacacatcacacatcacaccacacacatcagacaccacacacacatcacacacaccacatacccaccacacacacaccagacaccacacacatcacacgtaccacataacacaacacacatacatcacacacatcacacacacaccacacagataccacacacacatcagacacaccacacacacaccagctgactgcactaattgccccagccttggctgacagagcccacacacccacaccacacacataccagacacacaccacacaccacgcacccacatcacacaccacagatcacacacacatcacaccccacacacaacacaccagctgactgcactaactgccccagccttggctgaaagagcccacaaacacacatcacccaccccccgacacacacaccacacacacaccacacattccccacaccacacacacactccaacacacacacatacacacacccccacatatgcagcccacacacccccacacgccacacccacacacacacccacacatatccccccacgcacctcccacaaacacacataccccataccctccacatgtacatacacaccacaaacatcccccaacatacacataccacacacacacatccccctcacatagccacacacaccatgcataccacacccacatctccacccacacacaaaatacacacatcccaatccctcatagtcccacatatacaaacacaccacagtcacacacatcacatgacacccacctccccccaacatatatacacacacaccacacacattccctcacactcacaccataaacatgccccacacaaacgcatacacaccatacaccccaaaaaatacccacatacacatacaccacacccaaatacatcctcatttccccacgccccgccacatatacacacccacaccacacacacacatccaggccatacgtgcctctgacacgtgagaagaaaaagcaaaggggagtggaataaacaagggagggccaagctgaggcggccacactcacacccttgactctgtgcagcaggaagtaaagccgcctgccgggacacccacctaccaaggaagagcagagcaggaagtaaagccgcctgccgggacacccacctaccaaggaagagcagagcagggaggccgtgaggatcacacccgaggtctgcctccaccagtgtggaaatgagtgggagctgagaaaggacatagaagaggattccagggtgctggaaaccgggagaaatgacgagagtccgtgcacacaagaaagcttcttcccaaacctcactcaacagccccagctgtaggaacagagaagaaggatggctgggctgatccaaggttgaaagcatcaggaaatgtgatgcacactggggctgggtgagctggagggaggggaggccatggaggcaatggtgtgagcaggaggaaagaggagggaggaggagcaggaggtcttgcagtttagagggaacaatggtaggaaaaggaggcagggaggagaggaggtatggcctgagtgctacagcaatgtttaccagacagtccacctgatgacaatgtgcagggtctggcccaaggcagactactgccacagtgaagggcacagcaaatcttgggagctgagaaaggcaggtggccttgaaattagattgttgaatgaatcacccctaaacatgttcaagtcattcaagatagcaggaaatggggagggggacaccaacaagccagtactcagtgaacaagggaaatgcctggatggtcagaaaagtacagtgatgagaaaggctggatgtgaagagagcaactggttgcttgaattttcaaggaggaaaaaaattcgcatgagattggaagagaaacagccttttaaaaatgagcattctgggacatttcattaaaaataaaaatgggcagctagaagaaacacttcccctaagaactggaataagacatagagatatccactcttaccgcacctattcaacacagaactggaggccaggtgtggtggctcaagcctgtagtcccagcactttgggaagagccaaggaaggcggatcacttgagctcaggagttcaagaccagcttgtgcaacatggcgaaaccctgtctctacaaaaaactacagaaattagtcaggtgtggtggcacacacctgtagtcccagctactcaggatgctcaggcaggagaatcgcttgagatcagcaggtcgaggctgcagtgagccgtgattatgccactgcactccagcctgggtaaaagggtgagaccctgtctcaaaaaaaaaaaaaaaggttcaagctgagagccaaatcaacaacacaatcctatttacaacagccacacacacacacaaaaacctaggaatacatctaaccaagggagtgaaagatctcttcaagaagaactacagaacactgctgaaagaagtatcatagatgacacaactggaaaaacattcatgttcatggactggaagaatcaatatcatgaaaatgtccaaactgcccaaagcaatctacagattcaatgctattgctattaaattaccaacatcatttttcatagaattagaacaaactcttctaaaattcttatagaaccaaaaaagagcccaaatagccaaagcaacgctaagaaaaaagaacaaagctagagccatcacactgcccaccttcaaactatactaccaggctacactaactaaaacagcataacactggtacaaaaataaacacatagaccaatggaacagaatacagaacccagaaattaaagctgcacacatacagccaattgacctttgacaacattgacaaaaataagcaatgaggaaaggactccctgttcaataaatggtgctgggaaaaatagctaaccatatgtaaacgaatgaaactggaccactacctctaaccacagataaaaattaactcaagatggattaaggacttaaatgtaagacctcaaactataaaagtcctagaacaaaatctaggaaatagtcttctggatatcggcctaggcaaagaatttgactgagtcctcaaaagcaattgcaacaaaaccgaaaattgacaattgggacataattaaaataaagagcttctccacagcaaaaaaaactatcaacagagtaaacagacaacctacagaatgggagaaaatattcgcaaactatggatccaacaaaagtctaatatccagaatctatagggaagttaagttaaacaaatcaacaagaaaaaacacacaacctcattaaaaagcaggcaaagggcaagaacagacacttcttaaaagaaaacatataagcagccaacgaaacatgaaaaaatgcccaacatcactagtcatcagggaaacgcaaatcaaaaccacaatgaggtactatctcacaccagtcaaaatggctattactagaaagtcaaaaaacatcatgttggcaaaaccactgaaaaaagggaactcgtatacactgttggtgggaatgtaaattaattcagcacctatggaaagcagtctggagatttctcaaagaactaaaaacagacctagcattcaacccagcaatcccattacttggtaaatagccaaaggaaaataaaattgttctaccaaaaagacacctgcccttataagtttatcacagcactgctcacaatagcaaagataagtggtggctcatgcctgaaatcccagcactttgggaggctgaggtgaaaggatcacttgagttcaggagttcaagactatcctgggcaagaaagtgagacccctatcgctaccaaaaaaaaaaaaattttttttaattagccaggcatgatgtcacatgcctgtaatcccaagtacttgggaggccgaggcagaaggattgcttgagcccaggattttcagactgcagtgagataagatagcaccactgcatgccagtgtgaatggaacagccagaccctgtctcaaaaacaaaactaaacaaaacaaaaatagcaaagacatagaatcaacccaggtgtccatcaacagtggattggataaagaaaatgtggtacatacaagccatggaatacttcgcagccagaaagaaagaccaccaccatgtcctttgcagcaacatggatgcagctggaggctgcctccacttatcttaagtgaattaatccagaagtagaaaaccaaatattgcatgttctcatttataagtgggagctaaacccttggtatacgcggacataaagatgggaacaagagacactggagactccaaaaggagagagggagggagaggaacaaggactgaaaaatctcctattgggtactatatctactatctgagtgacagattcaacagaagcccaaaccttggcatcacgcaatatactcttgtaacaaacctgcacatgtaccccctgaatctaaaatttaaatttaaatttttttaaaaaatgggcaactaggaaaaaaataacccctatctctgggtctaaggtactaactgctgaaaatgagtgaccttcgatcatgaaagtggcagtgaaagtgtagttccccagagagaggcaagctatacacaaggcagggggaggccaggaagaaaagaggctgatttatagtatgagaaaggtcttggggctccagaggactcaagggtgggcgttagtgaagtgggggaggtgaaaagaggggagaagagtgccttggagatgtggtgagacggaacaagccatgagcatgttggaaggcagccaaagatcccagggggaaggcccctctcaggctggtgcatgctgagatcccgagtcaggatagagggtaaacacgcggctttgctcagtggccaaatggaagactgccaagaaagtcagtgaatggctctgaaggcaattctccccatctcccactgcaatcaacaagagctcaccaggacccaaaggcacagagctccagggactggaaccggagaggctagaagtgacccagccctcacacacagctttgccttggaagttgaagggggactttagctggcccataaatatggaccttgtacagaccacagaagcaaaagaggcaatggattagtatccagaacacacaaagacctacagcagatcactaagaaaaatgcagcccaacaggaaagtgggcacaagacacagacaggtgactcaaaggaaaaactggaatggtacaaacatgtgaagagcctcaacctcactggcaatctaaatctgaaggaagggagagaaggacaaagacagacagatgataggtggatgataaaaatactctttaaggccaggtccagtggctcacgctgtaatcccaacattctgggaggctgaggcaggtggatcacttgagcttaggagtttgagacaagcctgggcaacaaggtgagaccctgtctctacaaaaaataccaaaaaaaaaaaaaaaattagctgcgcatggtggcgtgcagagtagctgggaccccagttacttgggaggctgggatgggaggatcacttgagccccagaggtcgcggctgcagtgagccgtgattgcaccactgcactccagcctgggtaacacagcaagaccctgtctctccccctcttcccccggcacctctctctccatatacacatatattttttctctttagaggaatataataaatagcaaagtgctgacaaggacgtgggaaacacgaacactgacatggtgcaggtagaaatgtacactatggtgaccaatttggcagtatcttatcaaattgaaaatgtccatgtactacttctcaaatatttcctctgggaaaactcctggagaactctcagacaggttagcaaagagtttatcaaggatgctcactacggcattatatttgtcaagtaaaacccgaaagtaacttaaatgcccatcagtcagggaaggataatccaaatattacatctcctttgatgcaaggtacttaaaaggaatgaactagatccacaagcaatttgtaaaattatacccccaaacaaaaccatctatgccagcctgggcaacatggagagaccccgtctctacaaaaaaatttttaaaatttaacaattagccaggcatggtggcatgcactgacggtcccagctgctcagaaggctgagctgggaggataacttaagcctaagaggtcgaggctgcagtgagccatgttcataccactgtgctccagcctgggttacaaagcaagactctgtctcaaaaaaaaaattttttttgcatatatgttacactgtattatatgtattatgtatgtatagatatttgttagcacaaaatattaaaatggactagaaagcttggttctggataagatggcctgaacacaccctccagtctcgcttccactgaatgcagctataaattccaaagagaatacatgaagcagctatttgaggactctgaaaagtaaacagtagcaggcagataggggaagaagatcaaaattttaagaaccactaaaccagcagagagtttaccactttttcctttagtgtccctggcctggactcgagggagctccaaaacccaaaagtagccctgagccacacagagagcaccaggagaaggtctctagtgaggctcaaggagtgggaaaggggtctcctgccagcaaccaagcacggtagcagtggggacatcccccaggtaactcaaactctgggggaaaggaattttttccttacacctgaaagctctaagagcttctcaactcctgccgcagggcgggatgagggcagagttgcaggcacttggacacagcagggtatatgaagccccagcattccaggtgggggactgaaaaaggcagtcccaggtaactaaagtgtacccagagagttaacagctcagaaaagtgaccccaaaaagttgtttataaattcctggcctcatcccaagttgtgcctgtgtggatctgatcataaacagtatctgaaagactctgaacctaagatccagaccacccaggtctcagactggccactgggcggcactcacgaggggcagttccaatagcactgtaaagactctgaaaacaggacgacacactgaaaccaaacagagaaaaggctggctggaatctgacccaaaggggttgactgcctgtgaaaatataaacaccagcatttcccaaggatttaaacaagaccagtgatcacgtaaatgtccaggataaatccaaaattacttggcatatgaagaaacaggaaaatctcaactctcatgggaaaaaacaatcaagagacaccgaggccaggatgacacaggtgttggaagcacctggcacagactttacagaagctcttactttttaaaagtgctaggccgggcgcaggggctcacgcctgtaatcccagcactttgggaggccaaggcgggtggatcacgaggtcaggagattgagaccatcctggctaacacggtgaaaccccgtctctactaaaaatacaaaaaattagctgggcgtggtggcgggcgcctgtagtcccagctacttggaaggctgaggcaggagaatggtgtgaacccgggaggcggagcttgcagtgagccgagatcacgccactgcactccagcccgggtgacagagcaagactccgtctcaaaaaaaaaaaaaaaaaaaaaagtgctccacagcaggggatggtggcacatgcctgtagtcccagctactcaggaggctgaggtggaaggattatttgaacgcctaggagtttgaggccagcctaggcaaggtctgtagagactcggtctctttaaaaaaataattaaaaaataaagatgctctaagaagtcaaaggcaacactcagaacgaacagtgtgagtggcagaatcctacactgcccctctccccaagatttcctgccctaatctctgggactataaattatcacacgctgattatgtcattgcctggaaaagaggattctgtagatgtaattaaggttactaaccagctgactcaagagttaatcaaaaggagtttatccaggtatgcctcatctaaacacacaaatctataagaagcagagtttttgccttcttgaagtaaactttttaacaaaagaataaaagcagagagagtttcatcttgctggtagcagaagaggaagtctcagagactggaaacgtgggaaggattcaatgagcgactgtggcttgaagatggggtccctgtgagaagcaatgcaagctgcctcagcagctgacccacagctgaccagccagctgggaaacagggaactcgctcctagaaaccaagacactggactctaccagccacttcaaagtgcccagaagcagattcctcccctagattctctgaaaagatcccaccctggaaaacacctcacttttgacctatgcagagaacctctcaaacccactcagacttctgacttgccaaactatgaaataataaatggtgttgttttagccaccaagttggtgataatttgttacataaaaatagaaaacaaatacagattttagtagctggaagacagatacctatttaaattcattttgacatacccatgaagtaccatgtgataatactgggactcactgattgctctaaggtgagaacattccttccttaaatttattttctaaaatgctatttaagagacagtgcacgcccttaacttctccaggaatttatttcttctagtttttaaaactaccaccaaaattaactgtgtttacttgaagagaggcccaatcagcacagtctaattaatatgtaaatagaattaactttttaacattatccaccatacactttgagtttggtacactgtcctggcttcaagtctcccagaagctgcaatatggtgtccaagagcacccggcttgaattaaccaagaattcacgaccacatgctatagcagcaacatctgcaacagaaaatgaaacaaaacatcaagatcattatgactcagaacctagacaattttgtgcagaacagagtattttctcctaaaagacctaatgaaaacacagctgaaaatgaggcatttataaatgaaattgctaggcatggttgttcacacctgtaatcccaacattttgagagactgaggtgggaggactgcttgaggccacaagttcaagaccagcctgggcaacacagcaagaccctatctctacaaaaaatttaaaaattagccgggcacggtgtgtgcacctgtagtcctagctattcaggaggtagaggcagaaggattgcttgagcctaggaggtagaggctgcagtgagccatgatcatgacactgcactccagcctgggtgacagagcaaagccctgtctcaaaaaaaaaaaaaaaaaattatcaacaaaaatgacagctcagaaagaatcactgacaaccacaagagttactgaaatatcaagtaatgtgcagtgtgattagcaagcgccgaaagagtgaaacagagccctggaatctaaccaagtctgcggtcactatgctccagagtgctgcattaaacagctgtgggcagtcagggtccaaacataaggtgggggctgattatcttatctgggactgaggatgtgaaaattcacttttaatggcatccgtaatctgaaaacccaaaatccaaaatgctccaaaatctaaaaatttttgagcactgacaaagatgcacaaaggtcatgctcacagagcattgcagatttcagatttttgaattagagtgttgaaccagtaggtataatgcaagtattccaaaatccaaaacacttctggtcccgggcatttcagataaggaatattcaatctatatttgctaataacttttagccatgatacaaactgaaattatatgtagtcaaaaaagagtatgaaaatggattttgaagaaaacttattttctcaattttatgtcccattgtggaacagcaagtatcccatttcttcatgcctgaggccctgcgaatcggcctgaagaccagaccgagtaattacactgctcccaatgggcagtgctgcagccattactggctccatcaacatttccaaatacctcgaagtatccaatgatccaagtgcatttatgtatgtgtttgttaagagttttctttagttgggtctgacagtaaagcatgattcaaactgactaagatttctaagccaaatgacgagaccaaggtggaaaagagatggggcagcagcactgccttgctcctgattttaatggaaacgcttctaaaaattcacagttaagtgtgatgtctgatctgtttctggtagataccctttatcagtttaaagaagtcttcttctatttttggcttgctaagaattatcaaaaatggaagctgaattttatcacttatttcttctgcctttgactggatgtaatctgatggcagaatataaaatttcatgttacccggccagcttcatgaactcagatctttgacattactatttacttttgttcacctggtctcagatggaccacaagagggatagtaaagtctactaaacctaacagatgtttccccctttctacttgtctttgcagcattttaactatatcattggtgcagtgtcttcaagtacacgctttgatgacagccataactttattgacagaacctttcaatgacataaacttaccttctttggtcaatgaattttaacctgataggtacattttccagaatatgacacattctagttttactaaggaaatattttaggagaaaaacaaagcaagtaagcatttggcatcagaaacacataaaagatagcttttaggtagcttttcaggggaaagcattattcatgtaaataacttcagataatatactgaaacccagcagaaacccagatgttggagagcagcaacagcaaactgtccctgccaaacctgaccaaactgtagacccatgatcaagataaatgttaagactttatattttgaggaggtttgttacacagcaatagaaaatagaaacattactaatacatcgctgaagaaaaaaaaaaaatatatatatatatatatcatagcaagcaacatagaactatttggtagcctgactccagagatggctaccaggtgggcctggcctcatgttcagacccttgagtagtcacctacactgcgactcacttgtaacaagtagaacgcagcagaatgcacaccatgagccttccaaggatggacaggaagaagccttaagatttccactttggtctcctgccacttgctctaggatccctgagtcactatgaaagagtccagctaccctaaggctgccatgatgaagagaccacacagaaatagcacagtgaaggccagatgtggtggctcacgccagtaatcccagcactttggaaggccaaggtgggtgaatcacctgaggtcaggagtttgagatgagcctggccaacatggcaaaaccctgtctctactaaaaatacgaaattagccaggcgtcgtggcttacacccgtaatcctagttacttgggaggctaaggcaggagaatcatttgaacccaggaggtggatgctgcagtaagccgagattgcactactgcactccagcctaggagacagagcgaaactctgtctttaaaaaaaagaaaaaacacggtggctcacgcctgtaatcccagcactttgggaggccgaggtgggcggatcacgcggtctggagatcaagatcatcctggctaacatgatgaaaccgtctctactaaaaatacaaaaaattagccgggcgcggtggcaggtgcctgtagtcccagctactccagatgctgaggcaggagaatggtgtgaacctgggaggcagagtttgcagtgagctgagatcacaccattgcactccagcctgggtgatagagcaagactccatctcaaaaaaaaaagaaaaaaggaaaaaaaggataagaaatagcacagtgaagaagccttgagactctatgaggaaagaagagagagaaagacaccccactagcccccagctgttccatccctcaacgatttgagtcatcccagctaaggccccagatgttggagagcagaagcagcaaactgtccctgccaagcctgaccaaactgtagacccacgagcaagataaatgttaagactttatattttgaggaggtttgttacacagcaatagaaaatagaaacattactaatacatcgctgaagaaaaaaaatatatatatatgtatctcatagcaagcaacaatgcccaacacaacaaatgtactggtaaatgaagtctgtatcatatatctagtattttaactgcaaatgccaatgctgcatttcattaaatatcactaaaacatgaactacaaagtaaaataaatgtgaataaattcctacacagcttcagtatttgtcaatctgttggaatttctttgttttacatggtaatttgtactttgcttactgatatttaatctatctagaatgcctgtgagtcaattcaaggcctacagaattgactttgttaccatctaccaaaactaaaaaactgccagttaatttttctgttaaaatgatttttctaggttcatttttcattaaaagtgcttataggtaattctagagattagtatagtaattacataattcaagaaatggggccaggtacggtggctcccacctgtaatcccagtactttcagaggccaaggcgggtggatcacctgaggtcaagagtttgagaccagcctggccaacatggagaaaccccatctctactaaaaatacaaaaattagccaggtgtggtggcatgcacctgtaatcccatctactcaagaggctgaggcagaagaatcacttgaacccgggaggcagaggctgcagtgagctgagatggtgccactgcactccagcctgggcaacagagcaaaactcagtctcaaacaaaaaaggaaataaatctgggccaagcatagtggctcacacctataatcccaatacttttggaggccaaggtaggaggatcacttgagtctagaagtttgagatgagtcttaggcaacataatgagaccccatctctacaaaaataaaaataaaaattagctaggtgtggtggctcatgcctatagtcccagctacccaggctgaggtgggaggattgcttgaacccgggagtttgaggctacagcgaattatgatcaggccactgtactccagcctgggcaattaaagtgagaccccatttaaaaaaaaaaagaatctggtgtcaattatttgtgctgaaaaggatatacagagttgagacgtactatgtctgatacttttgctttagactgtaatagtttcatcttattttgagcaaaaaaagtaataatagggtattggcagaatgatagacatataaatcaatggtagaattgagagtacagaaataaatcctcacatttatggtcaactgaattccaacaaaggtgccaagacaaatcaatggagaaatgataaaagaataatcttttgaacaaatggtgctaaaacaactggatatccacatgcaaaggaaggaagttgaatacctaccacacaccatatacaaatattaactcaaaatggatcaaagatctgaatataagaattaaagctggccgggcgcagtggctcacgcctgtaatcccagtactttgggaggctgaggcgggcagatcacgaggtcaggagatcaagaccatcctggctagtatggtgaaaccccgtctctactaaaaatacaaaaaaaaaaaaaaaattagccaggcgcggtggcaggtgccttagtcccagctactcaggatgctgaggcaaaagaatggcgtgaacccgggaggcagagcttgcagtgagtggagatcgcactgctgcactccagcctgagcgacagagcaagactccgtctcaaaaaaagaaaaaaaaaaaagaaaaaattaaagctataaaattctttatttatttttttgaatcttacgctgtcacctgggctggagtgcagtggcacaatcgcagctcactgcaccctcaacctcctgagtagctgggactacaggcctgcaccgccacacccagctaatttcatacttaacagactaaagtacactgtaaacacaacttttatatatgctgggaaaccaaaaaattcatgtgactcactttattgtgctatttgctttactgcagtaatctggaaccaaacctacggtatctctgaggtatggctgtatttcaaaatcatatctctgataaggtactagtatattacaaatacctcttacaactcagtaacagaaaggaaaataacccaattaaaatatgggcaacaaggagtttctagttccaaatggtggcatagaagcaagttggcttcactgcctcccaaaagaaaaccaaaaacgaacatacagcagctccaagattatcagcagcaatatcccagaactctaaatatgaggctcagacagctctcacggcaacagacaagtgaaaaaactctgaacagacagtaagacaactggactttcatacctgtgacacccgtctccataatgtgcccagcaccaagcgtgaggaaaatttccacaactcagttgctacactggaaaaagcagatggaggtgaacaactactgtcccaccatcttaggttccctggcagaagacctgtccctgcttcaacccatgggaaccactgtaagtacctgaagggaaactatccctgaggatagccagaggcaaagtggggaagcagaactactattcccagccctggaaacgctgctctgtaacttggccagagaagacaccaaatcagagcggctgttcagcagatgcacacagtagaaggtatgtcccacaggtcccctgggcacagacgccttgccagtattcccacactgccgggttatcctctttgtgacctcccccattcgggatgggcaatactctgatggttccctagagccaaggtaaacctgggcttaaggcaccatctagtgcctataaagaggcagcaacctagcagaaaaaaaggaagaaattcaacaagtaaattacaaagaatctctaagtaaacatatccaataaaaaacaaaataacccagacagacaagactggaataaatactctttcaatgcaaagacatagacatatatccataagaaacaacaggaaacagggaaccacggcctccccaaacagacaaagcaaggaaccagtgactgtctctaacaagatggcaatatatgagctctctgaccaagaattcaaaatagtagttttaaggaaattcagtcatctccaagataacatagaaaagtaattcggaaatttgtcagagaaatttaataaagagattgaaacttaaaacaatcaaactgctgggcacagtggctcatgactgtaatcccaacactgtggaaggctgagataggggccttggggccaggagtttgagaacagcctcagcaacacagcaagaccccatctctacaaaaaacataaaaaattagccaagcactgtggtgatcgcctgtagtcttacctactcaggaggctgaggtggaagcactgcttgagcccaggagttcgaggttgcagtgagctagaattgtaccaccagactccagcctgggtaacagagcaagatcccatctctaaaaaatcaacatcatcatcatcatcatcatcatcaccatcatcaccatcatcatcaccatcaaacagaaatcctggaactgagaaacacatttgctgaactgaaaaattaatttgaggctctcaacagcggaatggatcaagcagagaatcactgagctcagagacaagctatcaaaaacacagagaggagaaaaagaaaaaaccaaaggaatgaagatcacctacaagatacagaaaattacctcaaaagacccaatctaagaattatggtgttcaacaaggtgatgagcaacaataaggggtagaaagcttattcaaagaaataacagaaaacttccaaaacttaagatataaatatccagctacaggaaaaccacagaacaccagagtcaacttaaatgagtgtaccccaaggtatatactaatcaaactctcaacattcagaaataaagagagaaacttaaaaacagcaaaagaaaagaaacaagtaacaaaggaactccaattcatctggtgacagacttctcaacagaaactatacaagccaggctgggcacagtagctcatgcctgtaatcccagcacttagggaggccaaggcaggcagatcacttgaggttaggagtttgagaccagtctggccaacatggtgaaaccctgtctccactaagaaaacagaaattagccaggcgtggtggcacatgcctgtggtctcagctactcaggaggctaaggcaagagaatcacttgaacctgggagtggaaggctgcagtgagccgagactgtgccactgcactccagcctgggcaagagagcaagattctgtctcagaaaaaaaaaaaagaagaagaagaaaccatataggccaggaaggagtgggatgatattttcaaggttctgaaagaaagaaaacactatataagaatatcgtatccagcaaagccatccttcaaatatgaaggactaataaagtctttcccaaacaaacactgagagaatttaacaccaaccagacctatcttagaagaaatgctaaaggaagttcctcaaactgaaagaaaaacacactaacatgcagaaagaaaaaaattgagggtataaaacccactggaaaaagaaatacttaaataatatataaaataaatataaaacacactggtacacagacaaccccagaatactctaatactgtactcatgatgtgcaatccatgcaaaactctagtgtgaagcctagaaacagaaacaatcagagctacagcgacctattaaaagacaggtaatataaacacgtaaattgagataacaaaaagtcaaaatatgggggatggagttaaagtataggggtatttttagttttttctttgtttctattattttttgtgatcaaagataagtcatctctttaaaataacctgttatatctaaagatttttttgtaagcctcatggtaaccacaaagcaaaaatctgtaatagatgcactaaaaataaaaagcaatgaactaaaacacaccagagaaaatcacttaaccataaaggatgacagtaagaaagcaagaaaaaagaagaggagttacaaaacaaccaggaaacaagcaacaaattagcagtaataagtccttacttatcgatagtaacattgaatataaacagattcaattttctaattaaaagaaatatggagtggctgaatggaaagaaacaagacttaactacatgctgcctacaagaaacccacttcacccataaaggcacatacagactgaaagtgaagggtggaaaaagatatctatgcaactggaaaccaaaaaaaacaggagtagctacatctatatcagacaaaatagactacaagtcaaagactgtgaaaagagaccaagtcactatataatgaaaaatggaccaactcagctagaggatataacaattgtaaatatctatgcacccaacacagcattatccaagtatataaatcaatcattaataaatctaaagggagaaattgactgcagtacaataacagtagagacttcaacattccactctcagtaatggccggatggtccagaccaaaaaaaaatcaacaaagaaacatcagaggtaaactacacactagaccaaatagacctgaatctttacagaacatttcacccaactgttacagaatatacattcttttcatcagcatatggaacattctccattacagacaacatcttataccacaaaacaagtctcaacaaattcaaaaagtagaatcatatcaaacagcttttttttttttttcgtagagataggatcttgccatgtgcccaggctcgtctgaaactcctgacctcaagcagtcctcccacctgagtctctcatagtgctaggattacaggcatgggccactatgcccagctcaggtatcttttctgaccacaatacaataaaactagaaattaatagcaagaggaccctcagaaactatataaacacatggaaattaaacaacatacacctgaacaaccaaatgcgtcaatgaaaaaattgggaagaaatttaaaattttcttgaaacaaatgaaaatggaaaaacaacataccaaaatctctaggacatggcaaaagcgatactaagagggaagtttatagcaataaatgcctgtatcaaaaaagtagaatgactccaaataaacaatctaatgatgcaccaaggaaatagaaaagaacaaactaaactcaaaaatactagaaggaaagaaataataaagatcagaccataaatacatgaaattaaaactaaaaaatgcagaaaattaatgaaacctcgagagcctcaaggttatctccgtagtccaacaagtgtccatgcccagaagagatcttgtagacgacactcccataccaaagcctgactttatgctgtttgttaagagggtctcatcttaaaagtacagagtcaatacaaggctggtgatgaagtcacctgggtcaaggttccagagtggtcttccttcttatagtgcctcaaattatatttgtttgctacctgttgcattaaaagtttctgttcagctattgtcctgacagatgattcaacaggtgattccgcaaaaaaaagacgaaaaaataatgttgatcagtgctcaagttgtaaatcaactctctccaaactaacctcacctttcaggaggttcaaccacaatgggggaaacaggacaatgctaatgatctctcctagagatcaaggtacatgagaaacaaatgggtgctcaaagaaccaaaaacagcaacaaggactcctgcacacctagaaaaagatgggctgttctgaagacatggggaaagggagccaccagcacataaaatggtacagtcactgtggaaacctgtctggcagttcctcaaaaagctaaacagagttactacaccctgctattccaccccgaggtagatacccagaaaaactgaaacatacatccacacataaacttctgcacaaatgctcgtatcagcattatccataacagtcaaaaggtggaaacaacccaaatgcctgtttattgacccttcactgctgacttagactctgacaacagaagaccagtaagtttaagctcaaaactggcaccttattcttccacatgcagagtcacacaattctaggactgggataccataattgtcatctagtgtcagactcttctcagaagacaaaaaccgaaggtcatatattcaagaatacagggttagtcagtggcagaagcagcaatggacatgaggcctcaagccccacctggccttttctgcacgccacactgcctccatgtgttggtgtgagcgtgtggaggaggagggattggcaggccaagagcagccacggtcactgacacaaaggtgctctgctggtaactttgtgtaactaggaaggtccctggaagactaagctggatccagtcctgcccccaaattatcaatcatcaaaaagtaattttgatgctgcaattattatctaacattatttgaatacataaaccagagacaaggagtacaatcatgattttcaaatcactgaaaagcagaaaaagcatttaaaagatttcactaggaagttaagcagttaatcttcacaggactgtgaagatttccgtctctttcacactcttcatttgccctcttatccaagttactggaaacaatcacattgatatcaatgtgctatcatttactacggttcagtagaaaattcacaatatgtaaagtaataagagcagatgttactattccaccttacagatgtccagagaactgacatcctgggaagtagattcactgagccaaacctctgcactacactaacctatcattaaagaacagtgactacagttgagtagaaatttaacaatttcaaggtttaaataaatttctgatttccagctttagcttaggatacagaaaactggtaacagctaccccattctttccgggggcagagggagagataatttaccaaaatcacaggtcttcttgaacacattagagagctaaggctggacatcagccaaccaatctgaaaaatgacgaaagacaacagcctccaagcagatacatgaagcaagcacttgctcacctggggcatatgctggacaccatacaaggcagcaaaaaaaataaaaaataaaaaaaccccagctaaaatactgaacaaatcacaaaatcagtggttgccttgggctggtgatgagtggagaactggactacagaaggatggcgtgcaggaagtctgggggaaggaattagttccacaacctaattgtggtgggtaaatgactgtatacttttgtagaaatttacagaactgcaaaaaggtttaaaaaaaaaaactaaagaatgaattcactgtatgtaaaattttaaaaagaacatttgtttcagaaggaaaaggatccatttgagagctaacccatggtctctattacctatccccacaggatagtcttggtatttgagactcataagcccccaagcctctgcaaatcagcactttaataaaatattcttcccagtcaaattcattaacatgcaaatataagtgcccactatccaactcttcataagagttcctatgtaaaccaccacaaacacaggaaaacagccgcgctgagcttgaatgctgggcaacagggcggcttcactcacagcccactgcctcaccagcatgtcagccagcaattcaggcagctcagattcacaaccagcaacatgacaagtcacataggtcatacgcctttggggtcacttgcaaagagaagaaaacgcaaattatttaatttgcaaatgccttctgttaaaagacaaccttcaaacaatgtttttaaagggagggcaatgcaagcctgctacaactgtaggtgccatgatgaacgtatagaatgctgccctgcactggagtaaggaatagccagaaaacatcacagtctcagcatccaccccgcaagaactatcatcaagttttaaaggattaagaaacaaatgtctacacagacctaccccattaggatttcaataaaagaataacaccaaaagaaaaataaaattttctctcactttaacagcagagaattttcctaagaacagcatgggaaaataataaagcaaataaagcagagattaaagatcaatgtaaaaaaaaaagtctgaaattaaataattcaaacttaaagctgttgggactttaaattatcccaaccattgtgaggaatgtagatatgcggctgcaaattctgcatttttctttcctgtaaataattaagaccaaactgctgaagataagacttcctcagataaccctccttggaatgtagcaatctataaacagtcaaatcactgtggcacacacactggtcttgtatggaaaatgttctaatcctgctggaacttctctgtctctgcctatatcagtgatatcttcttcactttggaaccctgaccccactggtttgaagttggtgtttctgagtggccaccgtcaagctctgtgcacaaataaactctgtacttagtcatattttctgaatctcgttaaggctgataagtcacagcaatgtattgaaccatttcactgacttcagaacaaagagcctcaatactcactagtacattccacctctttctataccaagaaattttttttttttttttaagagacggagtcttgctctgtcacccagggtggagtgtagtggcacgatctcagctcactacaacctccacctcccaggttcaagcaattctcctgcctcagcctactgagtagctgggattacaggtgtgcgccaccacgcctggctaatttttttgtattttaataaagacaggtttccccatgttggccaggctggtctcgaattcttcctgacttcaaatgatccacccgcctcaagcctcccaaaatgctgggattacaggcgtaagccaccatgccttgcttctatactgagaaattatttagttcctggactttatcccttatgatagttctgagacggaattttatcataactctcagggaaaggtttactttattatcttttaggagaattttactgaagaggcaatttaggtttttggaattatataattattatactaaaacaacagcaaagagctcagcttaagcttagcttaaggcttttactttagctagccagacagtaaaattatgattctgaataaaagcagctaaacttacttgtttttttctgtcaaggtacataactacacagaacatgcaaactcatctgtttccttcagatcattcattcttaataactgatacttatcagaatcacctggggtgattttccaaaataaacatacccggtacctatcccagaactatggaatcagattatccagggtgctccccagcattaatatctgaaaacactcctgagagatgtttacacactctcaaccctgactgtaaacaccagtctctgtaacagtcactacagctgaaaagaattacaggcacatttcgttttattgcattcactttattgtgctttgcagatactgtttttttacaaattgaaggaatgtggcaaccctacattgagcaagtctgttggtgccatttttccaacagtgtgtgcttaattcatgtctctgtgtcacattttggtaattcttgcaatagttgaaactttttcattattattacatctgttatggtcatctgtgatcaatgatctttgatgttaccactgtaattgttttagggcaccatgagccacacccatgtaagacagcaaatttaatcaatacatgctacttatcttctgatttttccaatgactggccattcccgtttctctccctctcctaggaacttgctattccctgagacacaacaatactgaaattcggacagttaataaccctacaatgacctctaaatgttcaagcaaaaggaaaagatacatatctgaaagcaaaagctagaaatgattaagcttagtgaaggcatggccaaagctgagacctgctgaaagttagacctcttgtgccaaacagccaagttatgactgcaaatgcaaagttctcgatagaaattaaaagctctattccagtgaacacatgaatgataagaacgcaaaacagccttattgctgatatggagaaagcccaagtattctagacagaagatcaaaaatcatcaaaaatcccttaagccaaagcctaattcagagaaaagccccaatgctcttcaattctgtgaaggctgacaggggtaaggaagctgcagaagaaaagctggaagctagtacaggttgcttcatgaggtttaaggaaagaagttgtctccataacataaaaacaacgtgcagcagcaagtgctgatggagaagctgcagcaagttatccagaagatctagctaagatcactgccgagggtggttacactaaacaagagattttcaatgtagacaaagtcgctttctattggaagaagacgccatctaggactttcaccgctagagaaaagtcaatgcctggcttcaaagcatcaaaagacaggctgactctcttgttaggggccaatggtgcgggtgactttaattgaagccaatgctcatttaaccattctgaaaatcctagagcccttaagaattatgctaaatctactcttgcctatgctctagaaatagaaaaacaaagcctggatgacagcacacctgtttccagcatggtttactgaatattttcagcccactgttgagacctactgctcagaaaaaaagatttctttcaaaacactactgttcattgacaatgcacctggtcaatcaagagccatgatggagaggtacaaggaaagtaatgttgactccatgcctgctaatacaatacctattcttcagctcatatatcaaaaagaaatttcaactttcaagtcctattttttttaagaactacatttcataacgctacagctgccatagacagtgattcctctgatggatctgggtgaagtaaactgaaaaccttctaaaaaggattcaccattctagatgccattaagaatattcatgattcagccaagcgcagtggctcatgcctataatcccagcactttgggaggctgaggtgggcagatcacctgaggtcaggagttcaagaccagcctggccaacatggagaaaccccatctctactaaaaatacaaaattagctgggcatggtggcgcatgcctgtaatcccagctacttgggaggctgaggcaggagaatcacttaaatacaggatgtggaggctgcagtgagccgagatcacgccgttgcactccagcctgggcaacaagagaatattcatgattcatgggaggaggtcaaaataacaacattaacaggagttcggaagaagttgatttcaatcctcatggatgactttgaagggttcatgacttcagtggagtaagtaactacagacgtggtggcagaaaaaaaggataagttgcttcttatggaagaacaaagaaagtggtttcttgagatggaatctactcttggtgaagatgctaagacattgttgaaataagaacaagagattcagaatattacataaacttagttgacaaagcagcagtaaggtttgagagggctgactccaattttgaaagatgttctactgtggaaaaaatgctatcaaacagcatcacatgctactgagaaatcttacatgaaaggaagaattaatcaatgtggcaaacttcattgttccttattttaagaaattggcacagccaccccaaccttcagtaactaccaccctgatcagttagcagtcatcaatatcacggcaagaccctctaccagcaaaaaattgtaacttgctgaaggctcagatgatcattagcatttttagcaataatgaattttctaattaaagtttgtacattttttagacataatgctattgtacatacaacagactacagtatagtgtaaacataatttgtatatgcactgggaaaccaaaaacattcatgtgactcatgtattattgcagtatttgctttactgcagtggtctggaagcaaacaggcaacatctctcaggtgcgcctgcacttactcgtgacaattccagccagagcgaaaacaaactgactttcatccgaatccagctcctggacatcaccgtctaacgacttcacaaaactctccattgtttgaccagtgatgctgaaaaacttcaaagctttatcctgaaagtttgaaaatcagagtgtcatatctttttacagacactagtgtgaaaacattttaaaagtgcaggatacagaagattctagttttaattgtagaatattgtaaaatctattccctcattaaaagttcccattaaaagaacagagaaagcagcttgaggcatgcaggagcaacaaaaactaccctgaagattggtggactcttcacacgcataaatatgatataggacaaatgtacatgatgatgaaagtaaatgggaagaattcactcaaaatgtaataaaaatatactagaaaaacatgctgcctatttgctctgggcattaaaccagaggtgttcaaacctttagcataacttttttcaaaaaaaaaaatcttaatgaaaacatgtaaaagaggtaaagactggctcctctggtagtttaaatcttcatcacttggcaaaaagcatttccaagtttgaacctttgagttacttcctttggggtgctagagttctgaagaagaattttaaaaccaatgtacattttaacccagttaaaaaattggaaatatttgcatttacaaatgatataagaaaacttcatggatgatcaaataatctaaaactgggttgtggtgatggttaatgcaactctaaaaatttgctaaaaaccactaaattgtacatttacaatcttacagtatgtaaattaaacctaataaagctcaacaaacttttaaaaacacatttagtctttccacctaaagtcaaacacaactgttatttctattagcagtaactaatttctcactggtttcctgccacacgtccccctcttcaccttcatttccagtcatgatcacgccatgctcccagagtcaaacaccgatcttttttggctcctcttgtcccctccaggtgcccactctgcccggccatcgcatctgcctcaactgccacagctctcatacatgttccttctttcccatctcccctgcagagggccgagctcactccagccagaccagctagaatgaccacctcatcagtcatcctgtgtagacgcgatgtgccacaactccacctcctaatccatcctcacccactgtcaggtgaatctttctaaaattctgctcttatcctatcacttttattgaaaaacccttagggaaaatccagtcttcccacctacagaatgaatcaccaacctggtattcaaggtcccaaagtcacatcccaacctacgtttaagctttacctccccactactctatgacattaactctccactgtgtcaactgacctactcactgtcctaaaacaaacccacccattttctgccatttctacctattcatcaaggcccatttcaaatttatccccttctgtgaagttccctgacaaatgcctgcacgcatgcatacatgtgcgtgtgcacgctcccacacacacacatgctcccacacacccacacgctcccacacacacgatcccacatacacaggctcacaggcacacacactccccccccacacacgctccccacacacacactcccacacacacaggctcccacatacacacacatgctcccacacacacacacgctccccccccacacacgctcccacatacacacgctcccacacacacacacgctctccccacacacacgctcccccaaacacacacacgctcccacacacacactcacacagtctcacacacacacgctcccccacacacacacatgctcccccacacaaacacacatacgatcccacatacacaggctcacacacacacacacacactcccccacacacacgctccccccacacacacacacaggctcccacatacacacacacgctcccacacacacactcccccacacacacatgctcccatacacacacgctcccacacacacacgctccccccccacacacacacactcccccacacacacatgctcccacacacacacacagtcacacacacatgcacatgctcaaacacacatgctcacacacacacgctgccacacacacacacagttgaaccttgaaaacaagggtttgaactgcacaggtccacttacacaagaattttcttcagtaaaagttacaccaagtgtgtctgctgctccagcctccccttccacctcctccacctctaccaccctttagacagcaatgccaacccaaccactcctcttcctcctcctcttcagcctactcaatttgaagatgatgagggggaagaccttcatgatgatctaacatacaaaaaatgtgttaatcaacgatttatgttgtcagtaaggcttccagccaacagtagagagagtcaaaagttctatgtggcttttcgactgtgcagggggtcagcgcctccaacctccatgttgctcaaggttctgcatctatatgtatgtgtgtgtgtgtgtatgtataaacacacacacacatctacatacatgtatatatgttagataacacaatattcaataaatactatattaaccatgagataatatatataaaagcacttttgatcttcttaaacacatgtaaagtattaatactgaagtggtaatatgtccacatataccacaaggtctcctggagagaagggatcttatttcattccctttgcatcaggttacaatgaaccatatacgataagtattcaataactagctgatgagtgaacaaaagaaaatggaaagatatggacttagtctttaaatgccttaataagctatatgctctaatttacacaagcagtaatcaacaatatctggagagcccactgaccatacttactcctcccaaaatggccttgacgacttcctcactgctggagacaccccacaagagggtacacgctgctgctcccatttctgtacaatactctgcctgctgcaggagttgctgcttcgcttcattcaactgctgtcgaagagccagtttctcctaaaagcaaaacaaaattgaaaaataaataatagcattcaaccttgatatatctttattacatttcctctttcacaaagatatttattaaagaaatgcatgtataattatagaaaatagttgcaaatgaaagctagtcctaagagaaccataatctgtatctacaaaagaaatttcaaaggcaaaaatatttgagaaatatctgaggaaagaacatactaccacattatggttgataaacccacagagctgaattcatctgctttaagtaactacatgaaatatctcaagccccaagtaactatacccagaaccagcaccaaccgaggcttctgaacaaaaacaacctcacaaagcaatttacccagaaagcaacatttctaagacaggagactgcctcctccaaatggctcactccattgaaaaaacgccatctgccagaggcagacaccaaataaaaggcacttggacatcaggatttgtaaaaaaacaagtactttagaaaaactcatcctgtataaacgtatccttaactcctcatgagaatattgccaaaggtgccagtaaatataaaatacaatctgtgaagctaaacagggaaagaaaacctaaaacctaagaccaggtaggaaagatgggaggaggggcaaaaagaagtgtgaaggctgggagtcctattcatgccctggtgcagcaagccagtgccagtctaagaagaagatggaggctaggaagagtttcctactctcccaccagcagtgtctgaggtgacctgtagctgggcaagtctccaccatggcactcttcacaagggaaacacagggaatggccgtcctgatggccctcctgacaacacaagcacacttcgaggattcaccttgagtgtactgctagagtgatggggggcttcctgtcctctccaaccaccagcaccaggtacctgaaattcccttaaaaggtgatagcatttcctgatttaataagacaaaaactgaaaaatataaaaccccagttaaattcatttataccaaatgtaattagttacataaaccacaaaattaaagtatattaaatgctgtagattttcttttagagagataaatacaagacaaagtagagggggcttttcaccccctggaggaaaaagggagctttggagccacaaatcaaaactgttgacctcataacttggattagggtggcccactcatagttacctggagacaatgcgtttggcacacagagattcatacacattcatacgtatatgcacacatgtatttaagaaaaaaatggccactgagcctctggcacatgctaatactgcatcatgtgatctgtcagctccgggtttttaatgtcttcattatagcaacaatctggactcctagattcatcctttcagtgtacgtagctgaacacaagtcatggtgacacatgaagaaaactatgtcacagcacttccttttggaattctagcttttctcacaacttaagctgtctgcatctcaattagtcaggatatggtggttcttctgcacgaccacaaaaagactactgagaagaaccaggaaggactttgctcactacagtcacatttggtagttgcaggaggatattccccaacgcagggttccacacatagtataataatatcaaaaaaaaaacaaacaaacctcaaagaaaatcatagcattcccagtaacatcaaaaataagaataattttttaaggtgcaagacctatacaatgaaaactacaaagcattactgagagaaagtagagctaaataaagagatacaccatgttcaaaaattggcaggatgtcaattcttcccaaactgatctacagattcaacacaatccctatcaaaatctcagcagacttctgtacaaagtgataatctgattctaaaatttctatggaaattcaagacagaatatctaaaaaattgtctgaaaaagaagaacaatgttagaagactaacagtgcctgatttagaggaaaaaactaactataaacctaccgaaatagaaccattgtggtattgctataaggatggacatatagatcagtgaaacactgacatgtcaactgattttaacaaaggtgccaatgcaattcaatggaaaaaggatagtcttttcaacaactgatgctaaaacaaccgaatattcatatgcaaaaaaaaaataattcaaaatgaatcatagggccgggtgcggtggctcacacctacaatcctagcattctgggaggctgaggtgggtggattgcttgaggtcaggagttcaagactagcctgaccaacatggtaaaaccccgtctctactaaaaatacaaaagttagttgagcatggtggcacgggcctgtaatcccacctataatcccacctactcgggaggctgaggcaggagaatcgcttgaacccaggagggggcgactgcagtgagccgagatcgtgccactgcactccagcctgggtgacagagcgagactccatctcaaaaaaaaaaaaaaaaaaacagaatcataggccaggcacagtggctaattgtaccttgggaggctgagacgggaggatcgagaccatcctgggcaccatagtgagaccccatctctacaaaaaaaaaaaaaaattttttttaaatagccaggcatggtgaggctgaagtaggatcacttgagcctggaaggtcgaagctgaagtgagccatgatcacaccactacactccagcctaggtgacagagcaagacaccatctcaagaaagaaaaaaaagaaagaaaagaaaagaaaagaaaagaaaagaaaagaaaagaaaagaaaagaaaagaaaagaaaagaaaaaacgaaggggaaaaaaagagaatcataaacataaatgtaaaatttctcaaaaaaatcgttatgaccataggttaggcaaatatttcttagatatcacaaaatcatgacctattaaaaaataataataaagtaagtttcatcaaaacttaaaagttctactcttcaaaagataccttataaagaaagtaaaaagacacgccacaggctaagagaaagtacttctaatcacatatctaaaaaaggacttgtgtccagattaaagaattcttacacatcaataagacaacccaattaaaaatgggcaaaagatttgaagagatatttaaccaaagaaaacatataaatgtgtccgggcgcgatggtaatcccagcactttgagaggccgaggcaggcggatcacttgaggtcaggagtttaggaccagtctggccaacatggtgaaaccctgtctctaataaaaatacaaaaattagctgggtgtggtggcgtaagcctgtaatcccagctgctcaggaggctgaggcagaagaattgcttgaacctgggaggtggaggctgcagtaagcggagatcacaccactacactccagcctgggcgagagcgaaaccccgtctcaaaacaaaaaaaaaaaaaaaaaaaagaaataaagaaaaatgaaaacatacgaccgcagaaaaacctgtacacaaatgtttatagtggcattattcataacagtcaaaaactggaacaggacgagcgaagtggctcacgcctataatcccagcactttggaaggccaaggcgggcagatcacttggggccaggagttcgagaccagcctggccaacatggcgaaaccctgcatctataaaataaaaaagaaaaaaagaaaactggaaacaatctaaatgcccatcaactggtgaatggatgaagaaaatgtgatatatccatccaatggaatattgttttgcaataaaaaagaataaatgatgtatgctataacacaaataaaccttcaaaacattatgccagacacagaagactacatattatacacatattatataattctgttcctacaaaatattcagaaaaggaaatctaaagagacagaaagatcagtgtttgcctggggctgtgcaagagagcagggactaattgcaacagatatgtgatggaaatgttctaaaagttgattggacaaaatccaacactcagtaattataaaaataaataaataaataaataaataaaaattctcagtcaggcccagtggctcatgcctgtaatcccagcattttaaggaaccaaggtgggaggttcacttgacaagagagagaacttggagaccagccttggcaacacagcaagaccctatctctacaaaaacttaaaaaaaaaaaaaattagctgtatggtggcatatgcctatagactcaggaggttcaggcaattggatcctttgggcccaggagttcaaggctgcagtgagctttgatcacactactgcactccagcctgggctacagagtgaggccctgtctctggaaaaaaaaaaaagaaagaaaaaaggaactcagcaaactaggaatagaggggaaccttctcaattttataaacgcatctgcaaaaacctacagctaaaatcataattaacgctgaaagattgaatactttcccctgagatcaggaacaaggcaaagatatccactctcaccactcttattcagcacagtgctgtagtgctggaaggcctggctacgcaagaaggaaagaggaagaaataaaaggtatacaaagcagaatgaagaactagaacagcccctattttcagatgacatgattgtccatgtagaaaatctcaagaaatccataaaagaactcctagaagtcaaaaagagttcagaaagactacaggggccgggtgcggtggctcacacctgtaatcccagcaccaagagaccaaggcaggcggatcacttgaggtcaggaattcgagaccagcctggccaacatggtaaaactgtgtctgtactaaaaatacaaaaattacccaggcatggtggcgcacatctgtaatcccagctactcgtgaggctgaggcaggaaaattgcctgaacctgagaggcagaggttgtagtgagctgcgatcacaccactgcactccagcctgggggacaagataaacaaacaaaaagcaaccacatttctatgtgctaattaaaaaatggaaaccaaaattaaaaacacaataccatttacggttactccaaataaaattaaatacttaggtaaaaatctaatacaaatgtgtatgctgaaaataattaggtaaaaatctaacacaaatctagatgctgaaaataattgtaaactgctgatgaaagaaattaaagacaacttaaagaaatggagagacatgctatgtttatgaattgaaagattcaacatagtaaagatatcaattctctacaaactgatctacaaacgtaccacaatttctattaaaattccagcaaggtttttgtagacataaacaagcttactctaaaatttatgcggaaaagcaaagaagctagaatagttagggcaactctgaaaaagaggaatgaaatgggaagaatcattttatccagtgttaaggcttactatgtcgctacagtaatcagaataatgtattattggtgcaggaacagatcaaagtacctgagtagagaacccacaacagacccaggccagtatgactgaattttgacaatggtgcaaaagcaattcaatgaaggagagagagtctttttgagaaacagtgctgaagcaactggacaacgataagccaaagaaaaaaatattaacttgaacttaatcctcataccttctacaaaaattaactcaaaatgaatcatagacttaaatgtaaaatgtaaaactataaaaccattaagaaaaaagaatgggagaaaattgtggtgacctagagctatgtgaaaaattcttagacataacaacaagaaaacagtctataaaaggagaaatcagtaaattggacttcattaaaatttaaaacattcgctttttgaaagaacctgtgaagatgaaaagagcagctacagactgggagaaaagacttgcaaaacatatactcagcaaaggacttctatctagaatatatcaagagctcaaacgcaaaagtaaaaaaagaaaaaatccaattagaacatgggtaaaagacacgaaaaaaacatttcataaaagagaatacacagacagaaaataaatgcatgaaatgatgctcaacatcattagctgttagggaaatgcaaattaaaaccacaacaaacctatcaaaatgactaaaattcaaaatagaataacaccaaatactggttaggacatggagaaagtgaatcactcatacattttggtgggactctaaaatggtacagacactctggaaaacaatttggcaatttcttccaaaactaaatgtgcacttaccatacaacccagtaattgtactctcgggcatttatcacacaaaaataaagacacacattcacacaaaaacctatacatggatgttactagtgtctttatcagtaatagaaaaaaaaaccgtaagaactattcaaacttctttcagtggaggaattacaacatattgcaaacaaattgcaacatatacataccatggaatatgaggcaataaaaatatctaacgatacatgcaacttggatgtatctgagtgaaagtcagtctctgccaggcacccatggctcatgcctgtaatcccagcactttgggaggacaaggccaaaggatcaactgagcccaggggttcaagaccagcctgagtaacatagcgaacctgtctctacaaaaaaaattaaaaattagctgggcatggtgacatgtgcctgtggacctagctacttgggaggctgacatgggaggactgctttggcccaggaggtcaaggatgctgtgagccatgatcctgccactgcatgtcactgcctgggtgacacagtgagactctgtctcaaggaaaagtcagtcgcaaaaggttattctacgttatgacattcttgagataacaaaattagagatggaaaatgtattagtgattgccaggggcaaggcagagggaatggggtggatgtggctataaaggggtagcaccaaggagccttacggcaatggtacagttccaagtgtggtggtggttacatgaatctacaaatgtcataaaattgcacagaactatgtacatacatgcacacacaaatgagtacatacagaattgatgaaatacaaagaagtccaggtgaaactggtgaaacctgaaagttgttaattgtaccaattccaatttcctggtttttatcttctactatagttacgcaagatatcaccactagggaaaaccgggtgaagggtatagataacttccctggactttttgaaacttctagtgaatctataagtaaacacaaaaaaatttttttgtttccagtgggattggaccaaaaaattttaaccaaaaaaaaaaaagctgtataaatttactaaaaactatcaaactatacaattacaatgcaaaaaaatttttgtggtacaaaatatacctcaataatgctgttttaaagaaacaataatcaaaccctgatatattttcctgtttaaaggaatactcatacataacagtttatcaagcacaaaactcccaagatttcctcaatatctttctgtagttcattctgtattttagcttaactacaatttttcttttaaaagtttcttggctcactgcaagctccgcctcccaggttcacgccattctcctgcctcagcctcccgagtagctgggactacaggcgcccaccaccacgcctggctaattttttgtattttctttttttagtagaaacggggtttcaccgtgttagccagaatggtctcgatctcctgaccttatgatccgcccacctcagcctcccaaagtgctgggattacaggcgtgagccaccgcgcccggccaatattctccaacagttgtgcctttaccaggaagctgggatctttttcctctaaagttcaaacgttgctactgccaggactctttcctggcccagcctcctcacatcataagcaggtatcaagacccagtgcacctcctccactgacccaacaaaatctctgtggaggaaacatctccaccatggccaggaacaaagtcttccttgtttgagtagcctttctctaggggttcagaagctgcttgctcatacatcacactttatgatttgggttccatactttgtttctgaccttttcttacatattgaactcaataacttctgccttttcctagtaatttttcactcatacagaagtacttactagcagccaggcacggtggctcacgcctgtaaacccagcactttgggagaccaaagtggatggatcacctgaggtcaggagttcaagaccagcctggccaacatggcgaaacctcatctctactaaaaatacaaaaattagccaggcatggtggcacgtgcctgtaatcccaggtatccaggaggtggaggttgcagtgagctgagattgtgccactgcactccagcctggacgacagagcaagactctgtctcaaaaaaaaaaaaaaaaaagtacttactagcagtaatctaattgaggatctagtctctggattctttcctgggtcctcaattctataataagtttccagggccaggtgcagtggcccatgcctgtaatcccagcattttgggaggcccaaagcaggaggatcacttgagcccaggagttgaagaccaacttgggcaacatagtgagaccccatctctataaaaaaattttaaaaattgttttaaaaattatacaatagaattgttcttgtaaaaaataaaaattaattaattaattaaatttagctggatgtcatggcacatctctgtagtcccagccactctggaggccaaggaggaggatcgcttaagcccaggaggtcgaagctactgcaactattattgcaccactgcactccagcctggcaacagagcaacaccctgtctcaaaaaataaataaataaataaaataagtttctagagtccctcctcatgatccgtacaggcctcaacagagactacagcaaaggctacagataaggcagctgctagaagagaaatggccttgttacagcaaccttgcaggagctttcctctgtattcaccttacaggagcttccctctgtattcaccttgcaggagcttccctctgcattcaccttgcaggggcttccctctgtattcaccttgcaggggcttccctctatattaaattggactattcaacaagatttttaactataaatagggaatagttgggtaaaatattcccacattttaaggtcaaagttccagggcaacaaaaccctagcgatttcaatgctactttaccatggctgtttccttcttctcagtatgcatttactggaatggcttcttttcttttttttttttttttttttttgagacagagtctcgctctgttgcccaggctggagtgcagtggcacgatttcggctcactgcaacctccacctcccaggttcaagcaattctcctgcctcagccaggctggtctcgaactcctgaccgcaagcgaaccgcccaccctggcctcccaaagtgctgggattacaggcttgagccactgtacctggcctgttagtactattatcatccaaaataaaaatatatccaggccccaaattttataaaaagtgtcagaatagttctagttctatggaaaaggaagttatgccacacaaaaagttaaactaagcaatttttaagaaatattagtttctctaatatttatataaaatataactggctaaaatgtaataatccccaaattaattacatgtacttctgatttaatacatctatgtccaactataagatattatgtacatgattttttcctccgagactctcatcgctatggtttgtccccctgcaaactcatgttgaaatttgatccccaatgtggcactcttgagaggtggggcctagtgagaggtgtatgggtcatgggagtggattcctcatgaagcgattaatgtgctctctggagggtgagtgagttcttgctctcacaggaatggattagtttccctgagagcaggttggtaaagagtctggcttcctcagtttctctctcttgctttctctcatcatgtgatctcgtcacacagccagctccccttctgtcatgatttgaagcagcctgaggccctcaccagaaaaagatgcccaatcttgaaccttccagccaccaaaatcttgacataaataaacctcttttctttataaattactcagcctcgccgggcgtgatggctcacgcctgtaatcccagccctttgggaggctgaggcgggcagatcaagaggtctggagatcgagaccatcctggctaacacaatgaaaccccgtctctactaaaaatacaaaaacttagccggccgtggtggcggccacctgtcccatctactcgggaggctgaggcaggggaatggcgtgaacccaggaggcggagcttgcagtgagccgagattgcaccactgcactccagcctgggcgacagagcaagactctgtctcaaaaaaaaaaaggaaaaaaaaaattaattactcagtatcagatattttgttatagcaacacaaaatgaactaagataattatgaacctttatgttgtagggcagatttttaaacataaaagttaaaagataccaagtgaatgatctacgtgttaaatggttataaaatccatctgttcaactacattccaacccactcagaatacatacatttacaaatacaatttattgaggattaagagtaaaaaattcagtcccactgcttatcataagtgaaaggctgtaagccagccccactttctggcttggtgagagtctgtccctgagcatggtaccttcttctctcttatgttgtcggcctgcacggtttccaggcgggctttaaagtgctcacaatccattttcagctgctctaattcttgctctttcctttccaggtctaggagaaagacataaaattactcaagatatttcaagtcactaatctctccctaagcatctattttgcccagtcttgacttagtaaaatgtgtactgatttcttaggtgagaatatttgcatttcttgacttctagcctgtccttgaataaccaatattctaacagtcctgttctctaagttcatctcagtttttagcccacagcacaaaggactttggttgttttctgttttgtgtttttaaggtttcactttactgccagactagtactcaaggcttcaagaaaacatgttatttaaaggatggaaggcagagctgagaagcccgactgtctcatggcacagacttgtcgctactccatgaaaagcagaaggcagctcagggagtgcacggcgccagcacaggctgattcacaaagctagtgtcacccactggcagactgactcaatgggaacaactgcagtagtaggcactggaggagggaaagaacagtgataaaaatgagaaaatgctatagtgaaagagtggaaactatgtaatacttcctctccaccgcactcatttagttgatgagtcaacaacagccaacaaaaatcccaaaaaaatccacgtcaataaatcaagcaaaagtactatcaactttaaatttaaaattttatgttgcagaaatactgacactcgaaaaaacaaatatataatacaaatttttaagtgtttgatctcaaaagctaggaaatcatcagtttttatgccaacatataccaagatttgagggtgctaagagctaatggtctaacttctttgattaaagtagcgatgctttaggacaatgattctcaaactttagcgtacatcagaatccctggaggacttgataatacagagtcggctgggttccatccacagtttccaatttggaacgtctggggtgagcctgagaatttacatttctaacaagttcccagatgagactcatgctgcctgtctgggacccacactttgagaactacttctgggcgataacctggtctctcatcaccaataaaataaaatgaacatgcaacacatgaccagcaacagcaaacaagggaacccatccacaggaatgtgaaaaagcaaaaaaatggagagtaatggaaggcagctacctaatatttgtcacatgaaggaatttcacttctttacacattccctctcctaatccttgaactgagaaaaacacaaggcaactctggttatctgtttcattcttgtactgtcacttgcgatgagtgagaaagcctcaaagagccaggcgcctggaaaacggaacattactccaccctagaggagaaaaagctcacagacacttcctcaactatctgcaaacaaacgagaagcgggtagggctttcgaatctaggggtctgagaggacaagaggaagccagaataagacacttgtggggactgcttagaaccacacgtgtatccccaaagctctaaaggaaatgttaaaaaggaaggaagaaagcaagctagtctctaaattttctagagaccccgtcctagaagaaaaattagaacctaaaagtaaatattcagaccagctaaacatcataaaattggctggcaaagcttctcataaaatgcgtttcttaggggcccggctcggtggcttatgcctgtgtaattacagcactttggaaagctgaggtgggaggatcacttgaggccaggagttcgagaccagccagggtaagactcccatctcttaaaaaaaaaaaaaaaaaagtggttctcagaaatagagcagagtgcctttggactatttcctctccctcaaatcacagtttcattttctgctcttttaagaaatattgtgccacaatgactttcactggaattcttgattttatcctaatcccagccaaaaaatcaactaggaagcactatgctttaaaaactacatacttgcattatttgtaacaaagttaaatggaaatacattatttatacacatacacactacaatcatatgaaataccacctatggtcacagacaaaaatgaacaaactgaaaaactgagatgaaatttgtgatttaaaattttttctttgcatttaactgttaaatttggcttctactattaaacggtatattactcaaacatggtaaaagagacaggaaatctctacaagccttatcatgtgtaaaaacctgtgggaattaactttgaccacccaaaacggctctcttgcattacggtaatttcataatcacttgttccagacagctgtatgcaaccctagtgtaagttaacataccaaagggacagggttaaaacatcccactctacgataggcaatctcatagaattccagtcagtcatcagggaggccacacccatctacgccaggctcctggggaggtgacaagtgcccttctgctgtatgaggccgccaccttgtggccagatgggagcattgctgctgcctcggaacagaaccctgaccttgcattttcaacttggccccactgcatgcatgctacctaaaagcaccctgaaggcagggatttgcataggttttcttctatgcccaccctccaaatgtctatatggaatatagtaggcaatacataaatatttgtcacataaatttatttcacttctttatacattccttctgctaatctttgaaccaagaaaaacacatggctactttatctgtatgtctcattctcatacaataagaatatattacttttatatttttttaagcccagagacagaaataatatgaacagtgaatattacaaacaacctaaatcatagaccatttaaacatctatgtatcttctgaaacaacaattttttttttccccgagacggtgtctctctgtcagtgcagtggcacgatctcagctcactgcaaccaacgcctcccaggttcaagtgatcctcttaactcagcctcccgagtagctgggactacaggcgcctgccaccaaccacgcctggctaatttttgtatttttagtagagatggggtttcactatgttggccaggctggtcttgaactcctgacctcaagtgatctgcccatcttggcctcccaaagtgctgggattacaggcgtgagctgctgcacgcagtccataatcctttcttaatacaggtctaataacatgagaatggctgtgtctcttgatgctcaatttattcacagggagggtacagaaagctagaaaggaaaataagggtttctaaaacactaatcaaagaaaactgcacaaacggcgtcaatttatcttaccatttctttatcacctggtatgtgaggtcaggagttcaagagcagcctagacaacatggcaaaaccccatctctactaaaaatacaaaaattagcccagcgtggtggtacacgcccatagtcccagctactcgggaggctgaggtatgaggactgcttgaacctgggaggcggaagttgcagtgagccaagatcacgccagtgcgctccagcctgggcgacagagcaagacttcatctcaaaaaaaaaaaaaaaaaaaaaaaactaaaatcaatcttgctgaactcaaattaattctgttgatttcccaaaccagagtcagggaattttgcttttcattcactgacacacatatatgacatgaacagcagagcggtcacgggtgatattaaaacaccacacacctcttccgcctccatcttgaccaccttgccaccttctctgtccataagctccccaagtgttttttttccctctactttcctatgttctggacaatctccaccctgatctgtgccccaagaggcagatgtgaagacccacagtaacaaggctccctcgtcctatggcttcctgttggatgcaatagcagccccgcaggaaactggaggactagagaagatgaccaaggatgggacatgtctccccactccatcctccctgctgggcttcatcctcctgggtgaggtcccaggtgctgtcaagcatcttgtctggagcaacgcctctcgccacgtctggtacctctctcccttctgctccttcagcccaggggaggcaatggcgctccactcgttagttcccggatgcttctttctccaggcactggttcccccaaccctgatcacactttaatctcttcactttactccgtttactccttttgttccctgccaggatatggatgtgacacactcttcatgttcttttatctgggccacaataaactccgagtcaaagtaataatccttttttggtgctgactctttggttctactcttcatggatatttctcaagttcttatttctacagactacaaataattcttcccagaactgaaatgggggtaccccgtatcaaactctcaggaaattaatctcaaaatatcctacactttagaaatcacatagcgcagtggttttcaaatcctactgctaagaatctaagagtacctggggaacaactacagtcccataaacattcaattaatatctccattttacaatgttatttacaatttttatttggaagtaatttcaaattcacaaaaactaatgccaaaaaaaattcctgttatctctctttacccagacttacctactattaacattttgtttgcctcatttgctcatcattcatttatttaattaaaaaaatttttttgagatggagtttccctctgttgcccaggctggagtgcagtggcatgatctcaactcattgtcacttctgcctcctgggctcaagcgactctcctgcctcagcctcccaagtagttgggattacaggtgtgctgaccgcgcctggccttttgtttgtttttcagtttggggttttttttatttttttgaaaaaaaatttttaaatacaaaaatgagccgggcatgatggcgcgcacctgtagtcccagctattcgggagactgaggcaggagaatggcatgaaccaggaaggctggggttgcagtgagtcaagatgatgccactgtactccagcctgggtgacagagggagactccatctcaaaaaaaaagaaagaaaaatctgttggtcaaatatctcaccagcgtatcatggctacactagttcgcattcactgctgatattttcaatgaccaaaacaaggctggttcacattaacatcaaaaaacatataaacaaattttaaaaggttaaaattatttaacattttaattatttcagaaatgaggccaacattttaggtgtgctgtcaacatacaaaaataattccagctcctctgagactgtcagtgaatatctgactgccactaaggtgccaaattgtcaaatgcagcataatgcatgaaaagtgttttctgtaagacaatgaagatttaaacagactgaatggcttttttattatttctctccaaaatgaacaattgccaatcaaggaaagcaaagaattgctcgatcttagcgatttaattgtaaaacaaaaatatctgactcctcttatttcaagcttcatatcagtttaattagaaagtgtcttcatgttgctaggtgaactacttcaaaaccaccatctgcaactccttatctgtgggattgtgtcttcttgcgacttcacaagcaaaactaaaaacaaactggatgctgaaagtgatcatccaagtaccttccaaaatccctgatactaaatttgtgttttcatcgcaccaccttcattgtacttactgattttataagtcaatgttctaaaacttaattttaaaaacaaatacccagaagatacagttttcatctattttacatctagaaccatcatatactattatataattttttttttgagacagagtctcgctctgtcgcccgggctggagtgcagtggtgcgatctcggctcactgcaagctccgcctctggggttcacaccattctcctgcctcagcctcccgagtagctgggactacaggcgcccgccaccatgcccggctaatttttgtatttttagtagatacagggtttcgccatgttagccaggatggtctcgatctcctgacctcgtgatccgcccacttcggcctcccaaagtgctgggattacaggcatgagccaccgtgcccggcccataaaattttatttataaaaaataggattttcctagttttaaacaaatttttgatacccactgatttattcaccactgttggatgaataaagcacaagaagggatgaaagaaaacagagggtgatatcttactaagtacttaagtgccactaccttaacaagtcaaatggaggttcctatagtgttttcaggcttgctttttttttttttttttttttttgagatggagtctcactttgtcacccagtttggagtgcagtggcatgatctgagctcactgcaacctctgcttcctgggttcaagcgattctcctgtctcagcctcctgagtagccaggattacaggtacatgccatcacacccggctaatttttgtatttttagtagagatggggtttcaccttgtcggccagtctggtctcgaactcctgacctcaagtgatctgccagccttggcttcccaaagtgttgggattacaggcgtgagccaccgcacccggcccggtttacatctcttgcaaacatagctgagtcttactcgaacctccctaaacttttcccaaactcatgaagtgacaatggccgagccagaagctaagctgctgggctgtgaattggagtctctcttcatttccccaagggttcacatagtttcccacaccatctgaggaggtgttatttaccagggactcctatgagccagtcacagtggcacacaccttacagagcttatctcattttaagctttgccatagcctatgaggtaagcattactgtccacattttgtagacactaatcagcaggcagtatatagatgatcctgtatctccatactctcactgccgatcataaatcatgacactttgtcctgacttaaccaccaagactaatcaaacgtcccttccattccatccatacagccacagtcccacacactaatggaactcacgaccttccttgatgaatgctctaattcatcttccacccaattcttcaaacctatcctacactcacctataaaaaccattctcctaaaaaacgtcattttgatcactattttgatggttatttccatgtggtaatttccagttgactctcatctcaaattaaaaacaatctatgattgtcttccataaactgttcattttccatccctaattctgctatacccccaatccttattccatacagcaatcaaacactagctgatgaacctgcaatcggtcctgctcaatcccatgtgtgactttcacatgccaccgccctggcctagaatatctccccttctcctcctaacaaatcatgcctctccccagtacccatcaactccctaagactctcaggcaacaccttcgtcagtattattgcaaactgccatttaccttgcccagtcctcccaaagggagatgctgggctagagtcaaaatcaagccccattcgctacttgatgtgtcacctcaatcctctagctggcttacaagttactgtatagcccaagcccatccaaacaaaactatatccacactctaaaagaaacttctcaaatcaggtctactccttccctgcctgtattcattcctaccttcaggttgcctttagtcactgcttaagattggaagcacatggtgactcatgcctgtaattccagcactttgggaggccaaggcgggcagatcacttgaggtcaggagatcgagaccagcgtggccaatatggtgaaatcctgcctctactaaaaatacaaaaattagccaggcgtgatggcaggcgcctgtattcccagctactctggaggctgaggcaggagaatagcttgaacccgggaggcagaggttgcagtgagctgagatcacaccactgcactccagcctgggagacagagccagacaccatcaaaaaaaaaaaaaaaaaaaacaactggaagtgcacattaacctctagaagcaaaaggagtggatactggacaatagggctagtgggagagtagaagaatcagtatgtcaaacggctcttgctgccacagtacaatcgtgaatttcctctgtagagctctattcttagagtcatgtctagcatgattagtctaggaagacaggctcgtgggaaggcttggggagggccatcagatctaggccttataaaaagaagaatttttatttttcttgatgttggctaaatggtaaaaactcaaaagccaaaattagataaaagatgccttaggaggccacagtaaacctcctggaaccagcccagcccaatctgatccttcctttctgttaacaccacgtttcctggagcacatgtgagtttcatgagataggactgcaaactagaaagaagggcatcaggccaggcgcagtggctcataactgtaatccagtgctttgggaggccgaggcgggcagatcacctgaggtcaggagttcaagactagtctggccaacgtggtgaaacctggtctctaactaaaaatacaaaaattagctggcgtggtggcacacacctgtaatcccagctactcgggagactgaggcaagagaatcgcttgaacccagggggcagaggttgcagggttgcagtgagctgagatcatgccactgcactcaagcctgggcaacagagtgagactcggaagaaagagagaaagagagacacagagagagagagagagagaaaagggaaaggaagggaaggggaagggaagggaaggggaagggaagggaaggggaagggaaggggaggggaggggagggaagggaagggagaaggaaggaagagagagagagaaagaaagaagggcatgcagagacagtagggtgctccctcaagaccgaataatcagccagggagataatgacagacaaaatcaggggccgagataatgacagataaaatcaggggccctgcactcccaacagcttataaagtaaaatggaaataaaaccatgtgtctgaaggaagcatagggtaccatgacaacatttcaaaggaagattgatcatgtcgaggtagtcagattaggcagtgactctgagccggggctgtgcccaataatataaagccttttaagccgtagtatggttttgcttaggtttttggatgataatgagtctgggtggggtttttaggtttttgctctttatcctaaaaacaaagagaagcgtctgaagacttacgcaggtgaatggcatcatcagattgaactgccacaaactactcaggctacagtgtgtctgagggactggagagtggcagtgaggagaccgccaggaggaggcagaacacagcagtggagacagacgcaggctgatgattcaggatgcatccatgaagtaacactcacaagacttactagcggacaggtttcatgcggagtagtgaggaagagagacaggtaacaaggaagactcctgggtctctagtctgggtgttggtgctctggggagactgaggcaggccagtgtaagacaggggcagggaacagatagcatgaggcagatatgacaacaggaagtaaaaatcagcttgcaccgagaaagcaaaagtctgtcctgacttctgtcaggctggaataacaaacacagataaagtcaggtgccaagttaacagaaaatatctctcaaagacaatgcaactgtaaagtgtcataatgacctcttctttgagtgactgctaacttcttattcactgagaagccttattctgtaaaatcccagactcgcacaaattttgttctttgaaattatacaagtaagaagatcccactcttgcctgcaggatctaagtcactgtgacacagaaaagaaccctatttccagctactgcagagcttcaagtaagggatttctagaacaatgttccacgtctatttgaacgttgtagttttcaaggaaacgggacctgggtccgcttcgcagtcagacttaatattggtccctttagacacagttctattttgcttcatttatgcttcacctaataccactctgtctccaagtcctacaacaactctatcctcttttttgttgacatgccccacagtttctcggtgttctggtatggtcttcctcactgcaaagagccataaacctcactctgtcagactgtgggtctgttcctggcgaccttagactgattaggctagggcagacatttagaatttgaaataatcatgaaacaagcaggaagaaatgccaagtcggagtcaggcacaaggccgtgagcttggagagttctgggctagagagtaaatccagcagccactggcatcaagacggtaactgaagctgtgagtgtgcatgagactgcctagggagaagccatggggtgaggcaatgagcggggcctaggcctgagtctcaagccctattggaaggctgcaaagcagagaaggataaatttcagcaaaggggaataagcaggaattgccagagagactatggggaaaaaggtgactctatagcctgggaaaggccgggactatgagataagatctcccaaaggcagactgtgatcaagtgaccacagatttgtttgtggccctcactcggtttgattttggcagcgggactgatcactaaagacactcatgttaactaactcatgagaccctgatgtattttttagaatgccagtttattaatttacagtgagaatataaccaaccagcaggctgccatacgctgctactggtgtatgcctatttaccttcctttcctgaagataaatgcacaaggaatgactaatctcagaaagttgctggatgagcatgaaatcaaaactagagaaattagaagtcaatgacctggcattctggcaaccaatgacacgccatgtatctggcagagtcccagtgggaaagagaaatcaacccagatgttgagacttttctgaagggaccacttacagaggggagagcagagataacagaaccaccaagggacagcgaggtacccagggactagcaacagccctacagccacaggagcaggggcagtccagcaagagctaggactacggaagaggcctctagacaggagtctctgttgtggagggatgcagctactgccacaaaacagcagcaaagcagggagggagcaggaagaaacaccccaacctctctctccacccagcaatgccttccattggtgagccccactggcagccagcaagggaaccaggagagccccatctgtagggatctacctcccagagcacaccacagggcagagaagactggatccaaggacttcggagagaatataaacaggacaaggtacggtggatgagaactgtcccttctaactggatgtggctggcccactgaccagatacgtttgcacatgccagaaactcatattctcggggtgagctatcttcttgtctggacaagtgctacagctacctgggccccctggatgcaccttttctagagggcacacagggagggataacaaccaaatgtcatgcagtaaattggcctttaccgtcaaaggctgatttaatcatgatttggcctcaatcaagcaagtgctgagacaatctcagagtatgtccaggaacttcaataggctcctaaactggtattcaacataacagctcagctcaaatctcaaaagtctgaatggacaccagaaagcctaaacttcaatcagttctagatactggctcacccatccacctaaagataagtgaacacacttccagctatctctactgacaagtaaactccatgcaaggtttccatttggcaagatccttaacttacacagtaagtacttaattttcagaatagagcttttcagttatcaaaagtataaaattcttctgccaatgaagagagagagaaagagaagctgttaatagatgctcagaaaactggcaaccaacttataccaacttacatatgtccaagtcactacactgaggaaacctccctttcttaggtcatcagactctcccaaatatcatcacaaggactgtaagagtaccttaaaattcgtttacaattatttacctagggtaaatctgctagaacaaattactgttaccaccaatgactgctgaaaatgaagactcacttttttctacaatctttaatttctggaagctctccagcacctccccatttagtattctgggtaagaagtcccgtatttgcatcacttcagttgtcagccgttccagatccttctttctgactttaacaaattcctctttagttcccatgtgctaaaagaacaagcagatcttattatatttctcttcacatgagaaaaaaaacaacagctcaagttaacttgcttttctttcacacctcttatgtgcatcgttgtttcaaatcatgtctctacctactgtatattctgctatagatatattttatgtacatacaaacattttgaaagctgaagcttcagccttcaaaaagggagccagatgttaaaaataataaggacaaacaggccaggcatggtggctcacacttgaaatcccaggaatttgggaggccaggagttcaagaccagtctgagcaacatggagagaccctgtcactacaaaaatatgaaaacgtgcccaggaggcccggcgcagtggctcacgcctgtaatcccagcactttgggaggccgaggcgggtggatcacctgaggtcaggagttcaagaccagcctgaccagtatggtgaaactccatctcactaaaaatacaaaaattagccaggtgtggtggccggcgcctgtacgcagcaggctgacacgggaagaaggcttgagctcaggagttggaggctgcagtgagctatgatcgtgccactgcactccagtctgggcaacagagcaagaccacgaaaaagaaaagtcatacaagagctctattcctaaaagtcaaagaaaacgcctgcaactttttatcactgcagcaccaaactaatcaggaggaaaaggaagtcatctggtttcctactgggtttgccaagccctccgcccgtgatctcatctactattcaccccaagcctccaagattgtctagatggaaattaaggcacgggagctagatgactctcaatgcagcacaattaataacgggtggaagcaggatgtgaacacggatctggccccagtccaagcgccttctccatcgcatgcaatcagttacagttataaaatcgatggagggcagattctctctaagcctgacgctaagtcccgaagcagggggccagggccttcggaggggaactgggcttccacggagcagagaagagagtgaccatccatcccacgctcccatgcccgctttggcgccactgagtgcccccaccacgcgcagcctcacagaccgggtccccgcgtgggtttggaggcgaagtcgcctcccgccccaggtctccaccccgctccggcccagcccacgccgttaggggaggaagtctccaggcttcccccaagcacgcgacagcgagccgtctccgagcgcacggggcgaggccctgaggggagcgaatggcgacggttcaaacacgctggcgtcggccagggcttcctcactaacccggcaggcctcctcagcggcgcccgcttcgcccatggccgctgccgcctccgctccgttcgcctgagcgtcggcgcgccctctgacccctcacgccagaaagcgcgggaacgaatccacgccgggggtcgggaacggagagccgccaggcccaaacctcccagaatttgcgcagtattctcggcctagagagcgaggagtggccttggcgaggtccctctttggctcttctggcttagccggggttttaaacttgttatctgcaaagcagaaggaaagtcagcccctgatgtaagtgtcaagtaaaataaatcggatgggtcctttcctgtttggcgaggaatgctacactaagggggactgcgttcaaatgggcagtctttgctggaaacctcgcctccgcgcgccttccctcgctcggattcaggcgcttttacgttaagggttgaatttttgtgtcaacaggcacctcgggaggtcgcctagacaactgagcggagcaactgagataacccccgctacgtgtggagtgacctagtccattaacttgccccagcacgcccgctgagtccgcaaaatataggatggcctcgggttttagatgaacccaaagctaagatttcttccctctctggaattagcaagcagcccgccctgcccaactcccctggaagcgcgcgtgctcgccaggcctcgggacgcctgcgcgggcgcccttgcactggcaccagggctccggggtaggggcgcaccgatctgcccaagcctctgcaggcactggaggaaggcgagccctccacccgctcaacaggccccagtgccggcctttccttccagtctcaactccacccgggggcccgggggctccacagttaaaaactccacgccacggagatcgcaggtaagctgctggctcaacgaggtgtgctaaatgggattaaagatcctggaccgtggccaggcgcggcggctcaagcctgtaatcccagcgatcagggaggccgccgcgggaggattgcttgagcccaggagtttgagaccagcttgggcaacatagcgagacaccgtctctacaaaaaaataacaaatagtggggcgtgatggcgcgcgcctgtagtctcagctacttgggcggtcgagatgggaggatcgatcgagtctgggaggtcgaggctgcagtgagccaggatcaccgccaagatcgcgccactgcattccagcctgggcgacagagggagaccctgtctcaaaaacaaacaaaaaatcctagaccgtttacaaacagccttccgtctcttcctggtcaagtcctaaccctggctaacctcgccgtctacagcctgaattttggcaaccgaaaggcagcgccggcgccacgtgcacacgggctgggccgctccgccagctgccagggccactgccgcgctcactcccagagcgcgctgcgagccgcggcgcctttgtgacgccatcagcccgcgcgccgccgccgccgccttctgtgcagtcgcggcccgggcggacggtggctggctgctccgcagcgctcggctggctgcagcggcaccgcgggttgcgcggccggggatgctccagcgggcgcgatggcccccgccatgcagccggccgagatccaatttgcccagcggctggcgtccagcgagaagggcatccgggaccgagcggtgaagaagctgcgccagtacatcagcgtgaagacgcagagggagacaggtgggcgcacggccgcggtcagccgcgccacatggcgggccgggggccggggctggggctagggccagggccccggcacggaatgcggcttccacgtgttgtcgtgacacccagcgtgtgcttcggtttccgcgctgccggaaccgcttcttgctgtgtctagtgcctttttacacttaaggaaacgggttgagggggttccgttacttatgaaagtcacagtaagcggggaagctgagaaaagacccacatgggtccgattccccagccggcatctcgaatcactgggctgccctgatttgccctggtgtccggtcggtgattgccgccttcctttgaccagcacctttacgtgacggggctgcaggagagaagacagacaaaatcactaccctcgaggatctattagtaataaagcaaggaggcaaacaggcaaataaagtagaccttgtgtaagtgtagtaaaggaaatgaaaaccaggtagcaggccgggcgcggtgtctcacgcatgtaatcccagcactctgggaagccgaggcgggcggatcacctgaggtcgggagttcgagaccagccggaccaacatggtgaaaccccggctctactaaaaatacagaattagccgggcatggtggcgcatgcctgtaatctcagtactcgggaggctgaggcaggagaatcgcttgaacctgggaggcggaggttgcggtgagccgagatcgcagcattgcactccggcctgggcaacaagagcgaaactccgtctcaaaaagaaaagaaaagaaaaaaggaaaaagaaaaccagataatagcaaaaagggaaggaggttgctcttcttgataggctgttctgggaaggcctctctgggctgataatcagctcagatctgaagagaaatgagcggaaaccgcctatgcagaggcaggaaagagcttcacgtgccctaggagtggtttgaaagaccaataagttggggttgggggggcgagtgttatgagatgaagttggagatgtaggcagtggccagatcacacagggctttgtagtttagattttaacggcactgctgttggatgatttcatttacctgatccaaaaatactttctataaactcttgagtgagcccatacaatatgaactacaatgtgtaatagaggttttaagataaagttttatttagttactgatggtactaatacatttagaatctgcttaaaagaacagatattatctcccccatcactgacattctcagtttgttttatttttaagagaaatcaccagactacccaaaaaaagaaaatacactttcctgggaagtctgatagaaaaaggaataaagaccaaaattcctgactttgattctgttaagaatctccccaagagattttgtttagtctcacagttccaggtaccccatatatgctggtggtttctaaacctaaattgttgtcccagcccattcctacttgcagctcggatgtgccttgctagcctggcttctctacctggcacctcacactcaggatgccaaaaaaagttctgttttctttccccgaaatcctgttctctgctgctgctccactgccacctgttttcttttcttttggttgctggttcccaccagccattcagattccagccggacacacgggattgtcctggactcctctgaattcctcatcctcttcccctggcccacatccagtgggaggacccccgtcctccctcgttcacctcctgatgacataaattcttgaccgtgggctctttgtatctcaccgaaacttctgcgcccgcatattccccaactggtctccttaacttcacttgtgtccccaggaatctgtcctccacagaccagcccagggtcatcttcctaaaacaaatctgatcccacatcaccaatattttttgaaattcagtgtctgcaagtcatgatctgtcctcaggtgctcttcctgcctaagccccgtgtaactgcttcatgttccgtcaacagaatcggtgatggttcttggtgtacagcacacaatttctcacctctctgcctttgcttctcctgttcactctgcaaagaatcccacaccttcttcactgccagcattcagttcagtatcacttccttcaaaaagcctcgcctagcatcttgccctactcctccagggttctaaaacatccattgtgtctctgttgtagcacttagctacattgcttcttaattatcaatgtgtcatccttctcccgaaacaccgtaagcttccatctgttttcttagccagaagtgggagtacatgcaaccgtaaaaggtcttggcctgtacaagagtggaagaccagaggcaatacttacggtgctaagacagcctagacagagccttttgctcaaaccctttggtgagccagcccaggatttgcaaatgcagaggttatgcgggggcctaagaccagtttacaccagtgctccagagtcctgtctggttagtgcctatcacacccagagtgacttgtcttgtatatcttgttcaccaccacattgcatggagtacagtggaccttcagaaaataactccgcagcatgaacgtcgtggacagtgataatgggacaagaaaacacaaggtctccaccacagctatgccccatcacaattacagcacaagtttggaaataacttggcctgacattcgactcccgatgacaggctccaacttttctgcatcttgtcttaggcatcataaaggaaatgtgagctatcactcttcctgaaacatgagctgttctgcagcaacatcaatagatagctttgtcattttaaaaataaattggaaatctttgtattgctttaagtaacagtgttgcgctcttgctttaactgttcaagttgggtgctcacagtcataaaatgatcactctccatggctttcatccataagagcttatttgtcccaattcattcattcattcatatatttagcaaacatttatggagtgccaactgtgtactattatgtacgctattcttggcactgggaatatagcagtgaacaaaacagaccatccctgcctatcttatcagttctgcaactttaaaaatattgactaaaatggggaggcatcccaaaatcaacccagtgacaatttcatttgtatcattgctttctttttggcagcatacaaaataacagtacatcttatggttgatgctatattagattcagtgtagatgatggaggatataagtttttttataatgatggggttagggttctctctatccaagagttataataaatagaagttgtggatgttctgacactggggtgtgttcaagtttaacactttacccccatctaaaatggcttctgggctcattgcgtggtgagagtggctgttggatttgctcatttcaaaacttactaatatttcacatgtctacatgtctcactttgatgtttacctcgtttgttttgtgtgtttttgttttttgagacagagtttcactctttcacccaggctgaagtgcaacagcgcgatctctgctaactgcaacctccaccttccagtttcaagcaattctcccgcctcaccctcccgagtagcgagcgcccaccaccacgcctggctaatttttgtgtttttagtagagacggtgtttcaccatgttggccaggctggtcttgagctcctgacctcatgatccgcccgcctaggcctctcaaagtgctgggattacaggtgtgagccacaccgtgcccagcctttgtttttgtttttttgagagacagagacttgctctgtcgcccaggctggagtgcagtggcacaatctcggctcactgcaacctccacctcccaggttcaagcgattatcctgcctcagcttcccaagtagctgggactacaggcatgcaccaccatgcccagctaatttttgtatttttttagtagagacagggtttcactctatgatggccaggctggtcttgaactcctgacctcaggtgatctgcccacctcggtctcccaaagtgctgggattacagaagtgagccactgtacctggcctacctcattcattttgaaataaataaacctatattgtattgttgtaaaaacagtagtattaagtttaagaaatttagccccaagaagaaaatagagaagacaagactgatgaaaccaaactgcttcagataatgtactttgcctttcagagctttgaaagtaattcagtaatgagcatttctctcttttactttgaatacttcaaaaattggtggcttgtttttattagattcctaggtgaacacacacacacagacataaatggaaaatagatgttttaaaagggaacaaaatgggccgggcgcagtggctcacgcctgtaatcccaacactttgggaagccgaggcgggtggatcacctgaggttgggaggctgagggaggaaaatcacctgaacccgggaggcagtgaaccaagatcgcaccattgcactgcagcctgggcaacaagagtaaaactccgtctcaaaaaaaaaaaaaaaaagaaaaagaaaaaagggaacaaaatgtaaaatgtattcctaggaatagaaagtgagacaattattattgtaatctctcaccaactcaatagtgctttgttcttacagtgtttcacacgtcttgggcttgaccctaacaataaatctttcatatagtataggtgatagaactgaggcccaaaagtcagttgacagttttctgatactgggcccctgtcagcaggaagctggggcctgagccaaggtttgtttccgtgctactctgttgcctcctagaaaagagacaatcagagtatcttttctcattgtattagcctgttctcacgctgctaataaagacactccggagactgggtaatttataaaggaaataggtttaatggactcacagttccacatggctggggaggcctcacaatcatggcagacagcaaaggagaaacaaagcaaaggcaggtcatccatggcggcaggcaagcgggtatgtgcaggagagctcccctttataaaaccgttagatctcatgagacttattcagtctcacgagaacagcatgagaaaaacccgtccccgtgattcagttacctcccactgggtccctcccaccacgtggggattattacaattcaaggtgagatttgggtggggacacagccaacccatattactcacccagcccactttgctgcccactgtccagggtctgttgtcactccgtcagaatctactgttttccattatgaacgcctctgtagcacatcatactgtgcctttgcctgttacaggtgtgggctatccatagcagatgctaggcagaccacattatcacttactgttggcttgacccaatggtatacttacaaaaccatctggaaataaatatgctgtttttaagtgagaaagaccagaatacagaatattatgccatttaggtcacacacacaactgtgcttttctgcactacctgtaactgttctgtaaataaatgcccaggaaagatctggaaagatacacatcagacaggttgcatcagtccctctggttcagagcctgggattcaggaggcagggagcaagacaagcttgtgattatatcactttgatggtggtaaggttctttgcaataaacgtgtttttattagttaggactctttcagttgcaacttgacagaacatctacgccatgctagttttattttattttatttatttgtttattttttgagatggagtcttgctctgtcgctcaggctggagtgcagtggtgcgatcttggctcactgaaacctccgcctcctgggttccagcggaacccttggtgccattctcaggattaaatgagcgcgcactcctagttcctgtgggatctgactgttaaagagcctggcaccttcctcctcccttgctatgtgacatgacaactccccttcccctccagccaagatgggacactccctgaggtcctcaccagaagcagatgctggagccatgcttgtacagcctgcagagcctcgagccaaataaacctcttagcgtcaggtgttcctttatagcagcgcaacagactaagacagtgatgcaactggaagtgcaggagcattaaccagcttaaacccaaagagaggatttgaaggacccaggttactgcatggggtcaggctcagggcactccttgtccttgctgggcagctacattgggatttccctccaaggctctccaccttcaagcagggtgtggagggactctgtggtctgggtggggcttaccccacgtggagaggcggcggcttctgccaattcagcagaattcccttggccacaggacaggttcaagaaaagccaagtgaccctctgcaggtaaaaatcttcttgctcagtccttaggagtttctagctctctccttactggacttgaagagaacacacagtttgtacctgctcccagccaccttgtaacacaggtggagcctgtctgagaatggagacaatctttggggcagcagaggttgcagtggagaaaaacaaggtgctggcaccagcagttgagctcctgcacaaagttgtgcttcactttcccccttaaaactagcatggctgccaggcctggtggctcacgcctgtaatcccagcactatgggaggccaaggtggggggatcatgtggtcaagagactgagaccatcctggccaacatggcgaaaccccgtctctattaaaaactacaaaacttagctgggtgcggtggcaggtgcgtgtaatcccagctacgtgggaggctgaggcaggagaatcgcttgaacctgggcagcagaggttgcagtgagccgagattgcaccactgcactccagcctgggcgacagagtgaaactgtctccaaaaaaaaaaaaaaaaaatccttaatagcatgaaatatccaatctgtttagtttttctcatcaaatgttttttatgagcaatccaaatgaggaccacccactgcatttggttaatatgtctgccaagacgctcttaaaatctaacagttcttacccatctttttctgtacagtttatttgttggggacataggtcatatgccttgtagagtttcacatatttggggtttgttgactgcatcctgttgtctcacttaccatgttcctctgtcccctgtatttcctataaactaatattaatagttaagatttgacacagttgggtgtttttttttttgacacttacttttgtaagaatacttcataggttggtgcagcgttcttcctgttggcatcacctctggcatctgatgcgtgattattgcctgtgcatgttaatgatcggtcggtgggtttgggtgttgatggtctgacacatccactttcaagtttcttaatatcgtttgtttgtttgtttgtttgtttgtttgagagacagagttgctctgttgcccaggttggagtgcagtggcacgattatagcttactgcagcctcaaattcctgggctcaggtcatcctcccacttcagccacctgagtacttgggactacaggcacatgccaccatgctctgccaattttttggttttgttgttggtgtgtgtgtgtgtgtgtttaagacagggtcttgctctgtcgcccaagctccatggagtacaatgttgtagagattgggttttgctgtgttgcccaggctggtctcaaactcctgagctcaagtgagccgccacgcctgggtgatatcttttcatctaatgttttagcagctatttatgatccttgcccaaagccttcaattcactggggatatatgtggtctttgaacatgattaaatataagtgcaggtcactgtggccaagaaaaaaaaagttactgcaatcatgaccgcagttggctcagctctagtggggtttattactcataccatacttacattatccacgtgaggatccccaggcatgacttgttcataacaagagggcaagagaaccagttggtacatcttctctccaactgtgaaagggaatatactttaataaactagttttatgttagttcctgatatcctggttttacatggaaaactatcataaaagaatcaaaatgcaggccgggtgtggtggctcatgccagtattcccagcactttgggaggccgaggccagcagatcacctgaggtcaggagttccggaccagcctggccaacatggtgaaaccttgtctccactaaaaatacaaaaaattagccaggcgtggtggcacgcgcctataatcccagctactcttgaggctgaggcaggagaatcgcttgaacccaggaggcagaggttgcagtgagcctagattgtgccactgcactccagcctgggcaacagagcaagactctatctcaaaaaaaaaaaaaagaatcaaaatgtaccattataaaattgttgatgggagaaagacccttagcaaagtggaaatcaatacctgtaaattaaggttaacgcactctgaatacactaaacaaactttggtccattaaaaggtctttttgtcacttttttttttttttttaagagacggactctcgctctgtcgcccaggctggagtgcagtggcgcaatctcagctcactgcaaagtgcaaactccacctcctgggttcacaccattctactgcctcagcctctggagtagctgggactataggcgcccgccaccatacccggctaattttttttgtatttttagtagagacggggtttcactgtgttagtgaggatggtcttgatcgtctgaccccgtgatccgcccacctcagcctcccaaagtgctgagattacaggcatgagccaccgcgtctggccctttttgtcactttttaagcatcttttggagtattaagatcacattgattctaaatatttgtttgcattcatctagtttatagcactttgttgctccaaaagatttctcctaggatctcctagtaaaatcctaataaagaccatttgtaacacacatcaagacttgaggattctgtttgtgttctaatttcatgtatccataggctcggaaactccaagactgtacacctaccttatcattttgtgattctttatgtcagtcagcaaatactttatgacacctggggtctactcaggagatttaaggctgaacgagactggtcactcaatcatagatcatgaaggcagaggtagagccctgagtagctagagtcagaacaaagccaaccctggtgatgctgcagtaaatgatcaccgttacagggagggtgattgacaaagccaacctggtgatgccacagtaaatgatcaccgttgcagggagggtgattgacaaagccaacctggtgatgccacagtaaatgatcaccgttgcagggagggtgattgacaaagccaacctggtgatgccacagtaaatgatcaccgttacagggagggtgactgggaggcagccacttttgaccttatactaggatccttaaaaggtaatttttgcaaaaatattccaaagcagcgtcagtgtccccaggccctttcctaggcctttgactttcagatgtactgtttggagctcctgtgtcctcagcctggctggttttctgttcctcggaagtggggctgcccgttgctggggcttcatatgacttgagcaggtcccccgcatctcttgtaagatttgcagttttacttcacaagaccagcgaaaatgtcagtgtgcaggatggctgcacgtggtgggcggggagggcgttgatgaggagccgatttcataagtggccactttgttcatgaattttgtgttgtgatgacatttgcttcctcacgctgaggccgggccaccactgccaccctaccctgtagctgataaagctgcaggtacagtagtaatttatttgtgtttcttttataacaataaggaaatgtttgcttcaattttttaaaaagacgtgcaaacgaaagagaattaaaatgtatgtgatacttcaccactttctaaacttgaagaaaagagatgcatagactctaagatgtttgtattgttttgccttccaggaggtttcagtcaggaagaacttctgaaaatctggaaggggctcttctactgcatgtgggtgcaggatgaaccccttctacaggtaacatgcgttccctttgtcatgctcccgggttcttgctgtggatggataagagacttgatcactcatgctgtgccagtcccccgatacactgacgcacactgacagtcatgcttcaaggagtcattttcgtacctcttgtccatacagaaagggatgcagggtcaacacagttaggtgaattgtcttttcaaataaaaggaaagatgtgcattcgttgtcaatttactatttctctgtaaaatttcataggttccatgctaggttttacattacttaaagtttctctcttctggtaagtttattttttgtggtcaaggatggcatgacaggagcactaactagtcaagaccctgtgaaacccaggagagggcagccgcgtcactgggcttcgggttccatggagagcagcagtagcgctcagcgaaagcctccctgttaaagccgagtgcgcctgcgcagtcacccaaacgcgcagcaggctcggtctctctgtgcggggcctgctgagcccgctaagcccaccaccaaagccaacactaaagatgtgactttcactttttaaaagctttgttctgacccatgaaagtagatccgatctgcctctgtagagggagagcaggcttgtccaacccacagccacatgtggcccaggatggctttgaatgcagcccaacacaaattcggaaactttcttaggaccttatgagatttttttttttaagctcttcactattactagtgttagtgtatactgtgtgtggcccaagacagttcttccagtgtgacccagggaaggcaaaagactggacacccctgaggtagaggaaccagccttgagaagtgcttgcaagtctctgatgcagatgacaggtcctcagggcaagattttacttttctgggttttaatgtgcagccttgccacttctcccgtgctgcgtaataacttgttttaatttatttttattttactgaacatattttgagtaggagcagggcaaaatatttttatattacattcaaaagtaacaaccaacagctttagtggaggaagaaaaccaatggacagaaatctcattttcccacgaaggaaaacagaccgggtgtggtgtgagtcagactgatgaggagtgtgcttttctcacggaacctcagaagagagggcgtctccccagagtgagcctgctgcacctcagcagggcatgctctctcagggaccccttcacccaggacagagcccagaaggctgagtttaccttcacattccaccttgtctctgagcaagctgtagggaggactttcccatggcgtgcagtgagcatccccagcatctcacctctgtgaggtctgccctgctgtctttgtgtttcacatcatttctgggattatgatgaagttttctttttttttttttttttttacagagtttcactctgttgcccaggctgaagtgcaggggtgccatcatggctcactacagccccaacctccctattgctcagctgatcctcctgcctcagccacccgagtagctgggactacaggtgcacgcctccatgcctggctaatttttgtattttttgtagggactgggtctcattgtgttgcctaggctggcgttgaactcctggactcgagcgatccacccgcctcggcctcccaaagtgctcgggctcccattacaggcatgagctgcccagcccagcttagatgggggttttttggttgttgttgttgttttgagatggagtctagctctgtcacccaggctggagtgcaatggcatgatcttggctcactgcaccctctacctccgagttcaagcaattctgtctcagcctctcgagtagctggaactacaggcacacgccaccacgcctgactaatttttgaatttttagtagagatgtggggagtgccatcttggtcaggctggtcttgaactcctgacctcaggtgatccacctgcctcggcctcccaaagtgctaggattacaggcatgagccactgcacgtggccagatatagttataaagccaggaactgataactaatttatttcatctctagttcatctgaactgataattagagatgcttttttaaacatgtagcttaacacagttcttgcagacataccaagttagcataatagtccgtcaatattggaacttacacatttgataaaattcagatattcggatacatacttcttagtggaagtgacaagaggggcagaccttcccacgagcggaagtgggagaaggaagcaggccgcggcacaggcatctcatgttgccccacgataacccccatgtttctccccaaccccgcctctgcaggaagagctcgccaacaccattgcacagctagtccatgctgttaacaactcagcggctcgtaagtcctgttgtttcttctccttccttccaagttttccgacttgctagtttaatgggaaccttgtgccggtattgtgtagatgtcaggggacaagccattcctgtttttaaaagctgtgataaacttagtcattgacttggtgagagggcacagtgtcttggggagaatcaatttgacatctcaaagatttcagaaaatgcttttagaaataacaatcctccagaatcttcaaattctgagttactttaacacttggagcctggagagccagatgcagggtccacggtgacctctggatgccaggttcgtcttccccaagagcagagccgtcactggtaataaatacatagaagacaccaccggtcacagactatgaagtaactcctctcaaccatagagaaaaaaaattagttagggtgcttctgtgtcaggcgttgattgcttataaaggaagaaaaaggtagccgacttcgtttgttctgcttaatgctcttcagaaaagcatcctaatgatttcaaccacccccagtggtgctctgaatattagctgactcatattgaacaaaattctacatatgatgtataatagatttacaaagatgaaaaaagaattgtgcaaaaagaaataaagccaaaaaatcaacaaaaattgtttttgaataaaaaagtgctagttctgtgggtcagaagagaaaaattcagtgttttgtaccgtagctcacccagatgccacctataatcagacaaaaatatgagtttctatatggattatataagtgtcagaattaatggttttgaactgattgtgaggtaccagtgcagtaggaagagttactagaagtggaacaaggagtcttgattttaaaagaaacgtggctttgcagtggataaaggaaaaatgctccagagagcgctcaaatctgacattgcaatgttgccagcccttccggttattctgtttttatttaaattcaaaagaccaaggccaggcacggtggctcacgcctgtaatcccagcactttgggaggccgaggtgggtggaacacctgaggtcaggagtttgagaccagcctggccaacatggttaaaccccgtctttactaaaaatacaaatattagccgggtgtggtggtgcacacctgtaatcccagctactcgggaggctgaggcaggagaatcacttgaacccaggaggcagaggttgcaatgagctgagatcatgccattgcactccagcctgggccacagagtgggaccccgtctccaaaaaaaaaaaaaaaaaaaagtaaaagatctgcacagtctaagtgatgtttaataaataagtgtaaaagaaatgattgagtatatttaattatcaacagattttctagctgcccaagaattactgagaaaagtgaataataaataatgctagtttgttcctcttcattattttcttgctatatggtagtatgttgatgtggaagccaagtatttagagccttttgttcactgcagaacacctgttcattcagaccttttggcaaaccatgaatcgagaatggaaaggaatagacaggctacgcctggacaaatactatatggtaagatctgccgcagttacttcaaaaactcctgggaagaaaagaatgtcctttatcttaaaaacaatgggaaggtttatttgtgaagcaaaacaagccacaggcttagtgtgaaggaagaatttgaatgtgtcctggaaagcttctctgttttggcttttgcagttcttaaggatgagtttggggagcattagtgaatacgttgggtattttttgagacagagtctctcttgctctgctccccaggttggagtgcagtggtgcgatctcagctcactgcgacctccgcctcctgggttcaagtgattctcatgcctcggcctcctgagtagctgggattacagacgcgcaccaccatgcttggctaatttttgtatttttagtagagataagggtttgccatgttggccagggtggtcttgaactcctggcctcaaatgatctgcccacctcagcctcccaaaatgctggggttacaggcatgagccactgttcttggctatgaatatgttttttgatctagaaggtaaatatgactgttgtgaatatttttttacttttgggatccaggccataacaatttcattggtcccttcattctgctgagctgattaatatttcttacctttccttttttttttttttttttttttttttaaacaaaaattgcctttctttagctgattcgtctggtcctgaggcagtcctttgaagtcttgaagcgaaatggctgggaagaaaggtcagtaaaccatttgagttagcatgtggtagccttaaaacttaaaaggtagtagagtgtcaagttttctgaacttgtagagtaccaatgagaagctcgatacatcgttacctatagagaattgaaatccagtagaaggcataaaacagttaagtatatatgacagttaacattttatcctgatttaagtgattgcttttttccttgtaaaatgatttcagccttgcattgattgttaggctgtgtaggttctagacggagtatttttgtttctctttgggaagtgggacgtgttggcatactgtcattcacagaagcatgcgtttggttctttagccgaatcaaggttttcttggatgtcctgatgaaggaggtcctgtgtcctgagagtcagtctcctaatggagtgagattccacttcattgatatttacctggatgaactctccaaagtcggggggaaggaggtaagcagctgccgacaggctgcccacggggtgagggggccgccagtgttcgcagtagtcgccagtgaagtgctgtggggtggcccttcgcatgaccagcgactgtagcagcgtgaattgcttcagtcctgtctgggaatgtgtcctaagcagctggtgggatgggatttgtgcactgaggatgtacatgacagtcttacctgtaaaacggaattgaaagcaacctacagactccactaaagaactcactaacacgggggagtactcaggatctagggagctttataaagcgctaggaaaagctatgcaaatggtagacatttttaaggtatatactcataaatagacaaaaggctggaaaggaaacatacattttttagtatgcaaatgattctctgaatgtgggaatgtgcacagattttacttttctttcacaggtgttttgcagggaacatgtatttttttgattaaaagaaaatatgttatattcaaaacaataattcttttgtctcacacttggaggcactgtccctgttacccctcttgtagaggaagtatatgtatgtcctgtatcaggtttgtccagcccgcagcctgagagctgcatggggcccagggcagctttgaatgtggcccaacacaaatttataaactttcttaaaatatgaggggtattttgcattttattttattttattttattttattttattttattttattttattttatttttagctcatcagctgttgttagtgtttgtgtattttaggtgtgccccaagacagttattcttccattatggcttggggaagtcacaagattggacacccgtgttgtatatgttgggcatataggatagtgcaggtcaggctgggtggctttctccagccactgcactaagataccaagtagctggagggcggcctcagtcttcagcctggctccaggcttctgtggcattccacaggggcgctttggggctgtgtgagacaggcattgcttggtctaactccacctttgtaaaagatgggaatggtccctttttcaaggacatgtcaagaagggaaaggctctttctcaatttttccctttttctaaattacagcttttagcagatcagaatctcaagtttatcgatccattctgcaaaattgctgcgaagacgaaggagtaagtgattcccctgttcgttcctcctgctccgtggcatttgctcatgggagttacttgccgtcgtgcagcctggcacagggtacccaggacactgcttcacagcagagagcggctggagaagacagccgaagctttgagcagtgatttggctcttctagcttcagtatttgcctcactcattccaggaatgccctcccacacccaaagatctgaccgctgggcgtcccgtgcctgtcgggtggcacttaggcagttcctctcagatgcttgctggcccgtgggggccactccagaccacagcaacgtgtgcagggcttccctctgtgcccctgaagccagaaggccaggccgtttgttctcatcacatgctctccgctgtgcttctaccctcagccacaccctggtacagaccatagctcggggtgtcttcgaagctatcgtagatcagtctccttttgtgcctgaagagacgatggaggaacagaagacaaaagtgggtgatggtgacctctctgctgaggagatacctgaaaatgaggtatccttgagaagagctgtcagtaaaaagaagacaggtaggaggatgttcttggtcagtgtagctttctttctgctaaaatcctcctcagacaaacagtttttaatacatttgttggcatcttactgaatgcaacctagagttgatggctctgcctcagcccctcccaagaaaggcagcagaggtgggttcattgtgcctggggggtgcctagcggggctctggggagacctgagatctgtcccatgtggcatacacacatttctgtacctctcaggatctcaggactctcctcgaggattttaccattgtcactgctagtgctttttgtttgctttgttgttttttgtttgacacgctaacaccttagcatgcatggcctcatttctacgggttactcgagggacgtacgcttgtttctgtggctgtcctttctcaactcatggcttccttcagggaatgtttttctttttcttgggatgtttaaatgcctactgtgtactgacataattcttactactgttttgtgtctggacttaatgtagaatgtgcatttgaagttgcaggcccatccaaactctcaccacagtgctttatggcatctgaatgcacaaaataagggaaatggttagatcacagcttacccatgcttttgaagtgttgtatacccatttaaaagcaaagctcctaaaaactaaggaccaaaggaaatgtgacagacatatatatatattttttaaagcagggtacaaactctacatagaaggagtctgatttgttgtttgggttttctttaattattatggctatataatagttgtgcatctgatttgtttttaaacgtttatttgtgcttttattttaagtgagaacataaaatgtttggttttccattcctgagttacttcacttagaataatggtctccaactctagccaggttgctgtggataccattatttcattcctttttatggctgagtagtattcacggtgtatattccgcattttctttgtccactcattggtcaatgggcattcaggccggttccatgtttttgcagctgtggattgtgctgctataaacaagcgtatgcaagtgtctttttcatatagtggcttcttttcctcttggtagataccctgcagtggaactgctggatcaaatggtggatctacttttagttctttaaggaatctccacactgttttccacagtggttgtactagttgacattcccaccagcagtgtagaagtcttccctgttcaccacatctgtgccaacatcttttttttttgagatggagttttgcttcttgtcacccaggctggagtgcagtggtgccatctcagttcactgcagcctccacctcccaggttcaagcaattctcttgcctcagcctcctgagtaactgggattacagacacctgccaccaggcccagctaattttttgcattttagtagagatggggtttgatcatgttggccagggtggtctcaacctcctgacctcaggtgatcacccacctcggcctcccaaagtgcagggattacaggcatgagccaccgcgcccggccaccaacatctattattctttgattttttaaattatggccattcttgctggagtgaggtggtatctgattatggttttcatttgcatttccgtgtgtttgttgaccatttgtatatcttcttttgagaactgtctgttcatttccttagcccactttttgatgggattgtttttttcttgctgatttgtttgagttccttgtagattctggatattagtcctttgttggctgcataattggcaaatcttttctcccattttgtttgtttattctgctgattatttcttttgctgtgcagaagctttttagtttaattaagtcacagctgtttctgttttcattgcattcacttttaggttcttggtcatgaactctttacctaagccgacatctggaagagtttttctaatgctatcttctacaatttgtatggtttcaggtcttatatttaagtctttaatccatcttgagttggtttttctataaggtgagagatgaggatccagtttcattcttcttgacaattaccccagcaccatttttgaatagggtgtcctttccccacttcgtttttgtttgcttggttgaggatcagttgagtgtaagtatttgggtttatttctgggttctcctgttccattggtctacatgcctatttttataccagtaccagtaccatgccattatggtgactatggctttatagtatagtttgaaatcgagtgttctgatgtctccgggtttttgagggttttttgtttttttgtgtgtctttttttttttggtgttttggtgttttgggttttttttggcggcggggaggggagagagacagagtcttgctctgtcgcccaggctggagtgcaatagtgcgatctcagctcactgcaacctctgcctcccatgttcaagcgattctcatgcctcaacctccctagtagctggaattataggcgggtgccaccacgcccagctaatatgtctttgtatttttagtagagatggggtttcaccatgttggccaggctgatctcgaactcctgacctcaagtgatccaccagcttcagcctcccaaagtgccgggattacaggcatgagccactactcccagcctctagatttattctttttgcttagtcttgctttggctatgcaggctcttttttgattccatatgaattttaggattgttttttctagttctgtgaagaatgatgatggtatttttatgggcattgtgttgaatctgtagattgcttttgccagtatggtcgttttcacaatattgattctacccatccgtgagcatgggatgtgcttctgtatttccatttgtttgtgtcatcagtgacttctttcagcagtgttttgtagttttccttgtagagatctttcacatccttggttaggtatattcctaaggtttttgaggttttgttgtttgttttgttttttgttgtcattgttgttttggtaggggtttttttgcagctgttgtagaagggagtaagttcttgatatgattctcagcttggtcgttgttggtgtatagccatcatactgattcatgtaaattggttttgtatcctgaaactttgctgaattcatttaccattctaggagctttttgggtgagtgtttagggttttctaggtatatgattgtatcatcggcaaacacggactttgacttcctctttaccagtttggatgccgtttatttcttttctgtgattgctctggctaggattgttcgtgcttttaaaaaatctggaaggataaaccaaaatgttttatttatttatttagagacagggtcggccgggcgcggtggcccaggcccgtaatcccagcactttgggaggcggagacaggtggattacgaggtcaggagttcgagaccagcctgaccaacatgctcaaaccctgtctctactaaaaatacaaaaaaaaaaattagccaggcatggtggcacatgcctgtaaccccagctactcaggaggctgaggcaggagaatcacttgaacctgggaggcggaggttgcagtgagcagagatcgagccactgcactccagcctgggcgacagagggagacgccatctcaaaaaaaaaaaaagagagacagtgtcttgctctgttgcccaggctgcagtgcagtggagcagtcatggtttattgcggcctcaacctcttgggctcaagtgatcctcgcacttcagcctcccaagtagctgggaccacaagcacacacctctttattttttgtagagacaggggtctcactatattgcccaggctggtcttaaactgttaggcttaagcattccacccacctcagcctcccaaagtgctgggattaaaggcatgagccaccacacctagcccaaaatgttagtatagttagctgtaggtggcagaattatgggtgatttctgtttcctttgtacttctctatttcctacagtgattatatattatatttaatcagaaaaaatcaagccggttgcagtggctcatgcctataatcccagcactctgggaagcccaggcagtcggataacttgaggtcaggagttcgagaccagcctggccaacatggtgaaaccaagtctctaccaaaaagtacaaaaattagccaggtatggtggcggtcgcctatagtcccagctacttgggaggctgaggtgggagagaatcacttgaacccaggaggtggaggctgaagtgagccaagatcgtgccactgcactccagcctgggcaaccaagcaaaacactgtctcaaaaaataaataaataaacagatagatagatagatagatagatagatagatagatagatagaatcaagaaccttttttttctttttaatttttagacctggtggacgggaagtaatttttttttttttttgagatggagtttcgctcttgtcgcccaggctggagtgcaatggcgcaatctcagctcactgcaacctctgcctcccgggttcaagcaattctcctgcctcagcctcccaagtagctgggattacaggcatgcaccaccatgcttagcaaaatttgtatctatcttttggtcaggctggtctcgaactcccgacctcagttgatccgcccgcctgggcctcccaaagtcttggaattacagacaggcgtgagccaccatgcccggccaagaatctttaaaagaaagaaaaaatactctggccaggcacggtggctcacacctgtaatcccatcactttgggagcctgaggtgggaggatcacttgagcctaggagttggagaccagcttgggcaacataacaagaccttgactttacaaaaattttaaaattagccaagcgtgatggcacatgcctgtggtctcagctactcaggaggctgagctgggagaatcagttgaacctgggagggtgaggctgccgtgaatcatgatcgtgtcactgcactgcgtcctgggcaacagagctaccagcgaccctgtctcaaaaaagaaagaataaaagaaatagtctagtctaggtgtggagactcatgcctataatcctagtactttggaaggccaagatgggaagatcacttgagcccaggagtttgagaccagcttgggcaacataatgagacccccatctctaaaacaaaacgaaaaaaagaaatagtctgattttaaatttggtgtagataacagagttgactaaggacctggagcaaattttatgtggtcatgggagtagtctctgggtccctccgctccccacatttctgtcgcctaacctggacacagactctcttccaagtgcagttccggacgttccctcccagttgcgttcatgaaacgtgtgctgcgcctgccccatcctccccaggccttgccctgatgtcgcaccactaataagcttagagggttccagaaacagtacacgtttaaaataattttgagttctcctgagtctgtttaatctgcttcttcataggctgtaacactctgaattttttaagtgctaaaagttgcattaatattgacttgtgcttcctgaagcatgctcgtgaaaagtgactgtactgctgtgacaggttctcaccaaggtcctaaactgacctgagactagggccggattcctgcgtccatgctcctacccctggtggtccagggcgatgccgtgtcccatccgcttgcctgcgtccctggacaggagcttcccatgcaccgcagccttcgtcctaacgggaccacgtgtgggggaggaaatcatcgaaggcagcagggaattggggttttatgggtacaaaaggcaaaacatgtgctttttcccagacttaccttcattcccatagcctgaacaatcaaaatgtcctgggaaattataaatggctttgcagagtttttctccttaaataaattttctttcattttttctttttttgagacggagtctcgttgtcgcccgggctggagtgcagtggcatgatcttggctcactgcaacctctgcctcctgggttcaagcgattctcatgcctcagcctcccaagtagctgggattacaggcacccgcaaccacgcccagctaatttttgtatttttagtggagacggggtttcgccatgttgcccaggctgatctagaattcctggcctcaagtgatccacccacctcagcctcccaaagtgctagaattacaggcgtgagccaccgtgcccaaccttcttttttgctaagagacacctaattagacagtggctcctgtggaagtagtcacttctgtgtatttgatatgtcaataatttggtctttgggtatattttgacagcactgggcaaaaaccattccagaaaagatggactcagtgatgaaagaggaagagatgactgtggaacctttgaggacacagggccccttctccaggtgggtagcagttgttgctttttatagaatatagatttgctgtggagtagcctgactagagaattagggtcacagctagttaagctataaggcctgaagcgtaaactcctttttaatcccttcagtcactaaatgtcaccttctgaagaataaccttattggagacaaggaaatgtaaatatgatggagttttgaaagagatagtagcacttattttgaatggctaagctctcctctgttctctaccacagagccagctctagtggcacttttcaaataaaaaaaagtttgccaagtacagattgcaaatctagattaaatttaaaatttaattacaagctcacgcctgtaatcccagcactttgggaggcccaggcgggcagatcacctgaggtcaagagttcgagaccagcctggccaacacagtgaaacccgtctctactaaaaatacaaaaattagcccgacaccgtggcgcacgcctgtaatcccagctactcgggaggctgaggcaggaaaatcatttgaacccgggaggtggaggttgcagtgaactgagatcatgccactgcactccagcctgggtgacagactctggctcaaaaaaaaaaaaaaaaaagcacacccaggtaaattttgttgtgggtactctatcacaattttttttttttaagaattgcttacccagcttttcccaagaataattttttttttttttgagacagagtcgcactctgtctcccaggctggagtgcggtggctcgatctcggctcactgcaagctctgcctcctgagttcacgccattctcctgcctcagcctcccgagtagctgggactacaggcgcccgccatcacgcccggctaatattttgtatttttagtagagacggggttttgccgtgttagccaggatggtctcgatgtcctgaccttgtgatccacccgcctcagcctcccaaagtgctgggattacaggcatgagccaccgcgcccggcctgaacatgcatttttcaaaggtagtgcttgtgctcctggttgccaagtcccagcacaagcttgtttagcctatctgttgccaaatgcttcagtaagggtttctcttactagcagatgtaaatggccaagtcaggcagtgttgtttggctgcagacttatgtttagtttctcttcctgcctagtttgactataaggctgttgctgatcgactcctggaaatgaccagcaggaagaacacgccccacttcaacaggaagcgcctctccaaactcatcaagaagtcagtaactggggagagggttctgacatcatcattcctttagttctcatctcctggtgtgggacaagccatctgcatgcttatcttttttctttcttctttttttgtcctttaatgcttttgtgtatagcaatgtaatagacacatgtaaactgaaaagcttaatggaaacagcagtcccacccctcaggttccattcttccagtgcagccatactcatctcttagctgctttagaatgatgtgaagtctattcatgtctaaaatgaaccaaccagaaactgatgtgaatctgctatttaggtgtcttctgctggtgtgctgctgagatagatagggttaattctttacctctcccctccctcccatatggctatgccaaaagtgttagttaattcagctgtcagtgttgatgtcactctgaccatagtgacatgatgacctggaattcatggagggcctcgtgtggcttgctgtcattggtgacaacaactgtctgatcacactctaggagccgggcactgctctgagcactttgtatacattcaagtattccatgttaagcccccagaaagtagctcctgtagttttgcccatttcccagctggttcttagggcacaggatggtcctagcttgcctgaggtccctgccatccagtgtctcctcccccatgcacctccccacactgcgcttcgatgcgtcttgtttgttctaatgcacaaaaattgtgtgaagcaaaacatggcttcgcctttctccactggagaattgaatatgagagagatctaagctatttctgccttcagaaacaaaaattgaatttcttagtttgatttgggtgtgccaagatgcatctttggcccgccgtgtccttgctggtattgatggtaaccgagggcggcactggccttgagctttttggcttttgtattgcaccacccttccctcacagaatttcctgtctagcctcccctcctggaggagaacgtgaattaacaactatttaactatggcttgtattttaaaaatcaaatacatatgtctacagaagacagaagggatttctttatgaacatttgttatttttttattttttattttttatttttttatttttagattccaagacctttctgaaggtgaggcgcgccaagaatcatcattcatggtgtttttcgtgaatatggaccccactgggggcgttgatgccaaacgctgagaaacaagattgaaagaactttactgaaaacctctgataagaaataatagtccctagcccaggcaaaatagcaaggccacatctctactaaaaatgaaaaaattagccaggcgtggtggcgtgatcctgtagtcccagtcacttgggagtctaagaggggaggatcgcttgagcccaggaggtccaggatgcagtaagttgtaatcacaccactgcactccagcctgggtgacacaacaagaccccaacttttaagaaagacagaccagcccttacctagtcataccgcagtacagcgtgggaagtgatgcaagcctagggctccctgcagcctgcccaccttcctatcctgggctctccctaaccaccaaagcaagagggcagactgctctcatgtgtgggtactgcgatgttttggtttggtttttattattttaactagatggattttcaatggcctaggaaggttttaattggatactctatgaaggtaaaaaatgtaatttctcaggatccctttcatttgctcttatggtcaatggtccccccgggaaaggctgatgctgtaagctttgttacatttggacaagtcagtgaagttaccccatacccgtcattcactagggacacttggaattgggaaaggcaccagcaagctggttggaatgcagagactgcattagccaagcgtccggggtccagccatggagggtgtcaccgagggcttgtgatcccttgccttgccttggttgagaaatccacaaagcttttttaagtctgtaattcctgtgtcagcagcgctcaggtttgggtgggagaaacggtgaggaacgatgatgatgaggcagaaattgggaggggtgctgctcttaggcccctggggcagagtcttgagcgcctggggaagctaacagtgtgtcactctggcatctaggaagcagtatatctcaactcagttttgcggaggacatttctgctgatgaagatgaccaaatcctcagtcaaggaaagcataagaagaaaggaaataaacttttagagaaaactaacttggaaaaggagaaaggtaagctgtaaagctaaaaagaagggcacgactcagcccttggggagcggcatgcaccatggaggcctcggagacttgagctcgtgccgtcataaagcattagcagagcccaaagcttcagtctttaatggctgagaggtaaaggcggttttccaagtgttgtgctgtttttggtggagccgcgtccccacctcaccccgctcacgtccgcctgctctccagggcacctctgcagggaagcaggagctgcagggagcactggggggcggctgtttgatgaccactcgagatctatggtttttacccttgagccctaaaattagtggaaatgggactatttcagttccatatgtgtttataaacggacagaaggaaggcttccagtcacagttggggatggaggaagtgggaccagacgacaaaggtagtgggcgcaccaagtacctcaagggagacaggaactttcctcgtggtagaatgtcaggaaattgcgtccgccagtcatactgtctgagaatcgccagcaggactctggcccagctggcactgggtgcttgttgatgggtttctgtctttttaggaagcagagtcttttgtgtagaggaagaggacagtgaaagcagtcttcaaaagagaagaaggaagaagaagaagaagcaccacctgcagcctgaaaatccaggcccagggggtgcagccccatccctggaacagaaccggggcagggagcccgaggcctctgggctgaaagccctgaaggcacgtgtggccgagccaggtgcagaggccacgtccagcactggggaggagagtggctccgagcatcctccagccgtccccatgcacaataaaaggaaacggccacggaagaagagcccgagggcccacagggaaatgttggaatcagcagtgttgcccccagaggacatgtctcagagtggcccgagtggcagtcatcctcagggacctagagggtccccgacaggtggagcccaactcctaaaaaggaagcggaaacttggagttgtgcccgtcaatggcagtggcctgtccacgccggcctggcctccattgcagcaggaaggccctcccacaggccccgcagagggggcgaacagccacaccacgctgccccagcgcaggaggctgcagaaaaagaaggcagggcccggcagcctggagctctgtggcctgcccagccagaaaacagcaagtttgaaaaagaggaagaaaatgagagtgatgtcaaacttggtggagcacaacggggtgctggagtccgaagctgggcaaccccaggctctggtaaggtgggagcacccacaggccagctcgccacagaggcactcactcgcgtccatggggctccactgcctcctgagaggaagggtgggggctggcggccaggcctctggactcagcagcagttagaatagggtgtgttcataacagccttcactaaggaggaaatcacaggtgaccagtacttcggtcctcctcatcggccaccttcactcccttaggccacatgcttgggttcgggagggcccactccaagctgggaaagttatcccttgggccaggcactcctgccccaggcgtgttcaggccagtctaggcctctgtcaaaggcaggtctggttttcttcatcagcgcatggccagtccaggcccctttggcaaaagaggaagcccaaaattctcttgcttcactcaccttcttttctatattcttttcttttcttagcttcccccctaccccccagctcaagaaacttcactagcaggaccacttatcttcttaatggaaagactttccttccactttgatttctagagccagatataaatgaggaaccaagctgttgatctggtcttgggtctggctgtgtcacccaggctggagtgcggtggcacaatctcggctcactgcaacctccacctcccaggttcaagcgattcttctgcctctgcctcccaagtagctggaattacagatacacatcaccatgcccagctaatttttgttatttttgtagagacagagttttgccttgttgcccaggctgggctcaagcagtccacctgcctcggcctcccaaagtgcgggattacaggcgagagcccccgcgcctggccctgatccgcttttcacaccacctctgggcgccctgggcttccaggccagggccggcaaacgtagtgtcactgcaacagagccacatccacttgtatgtgcaggtctgtggccactttcatgctgcagcggcagaggggagtggtagagacagagacctgcggtctgtaaagcagaaaataactctgcccttcacagagtttgcgcaccttggtcacctcttggtttgcacacaccgctttgcggagattatgacatctcttgtttaagtggacatgtgtggacctggtgaagcgctggtttggggctaagagtgtctgcaagtggctagtgagtgagtttatggtcaggaaagccttacccaggggcagcagtgcactgagctggacggcaggaggcccatttctagcctcgagtctctcctacctcacagtgccgccatctcctccctggactgcagcctgcccctcgtaccctcagcgctgctccctcactaagagggccagagacattgcctttcttgctgtcgtctcaggcccctggcagcctattgtaaagaggatggggtgttgctcaataagtcccagggtcaagggaagctttcccctgccatctgtcatggcacagggaaggcgcacaggagaagctcctcgggcttccctgccctccaggcggcacacttgaacctgccggagccacccgtgtgtcggcagcggcactgggctgcccacacctctgagagccaagtacgagacccggtctctctctgggtggctgtcagttgctgcacacgcaatgagtgtcctgggcctgcctgtgagggacccacagccccacatgggcatcactgtcctccacaccagactgccagcgcagtgacgattcagctacaaatgggagagtcgatcttattaacagatcggctttgaaaggccaaaatccccattttgaagatgaagataaaagtgggtccttactctgacgaggcgttttcatcgcccctcttggcatggtgccatgatagcggtcgtgttgtgcgtgaagcctgagctctgccgaatggaagggctgtctgcaagtgcggtgcggaagaccgcgggccgtcgggtgggctggatctgcctggggctctgccttcccctcctgtgtgtgtgggcagcacaggaggctctgtcgtctgacccctcctccgcttctcacccctcgctcacgtagggaagcagtgggacttgcagttccctgaagaagcagaagctgagggcagagagcgactttgtgaagtttgacacccccttcttaccaaagcccctgttcttcagaagagccaagagcagcactgccacccaccctccaggccctgccgtccaggtacgcaccctccccagagtggcacagcacatttcaccacaagggcacagatgggcttgagctgacagtgcttcccatgccgggcctggagccccactgtggccctctgagcctgtccacagtggacaggttccacggccagggtagcataaggtctgagtggtctgggacccaccctgagggatcacagtcaggaaggggactttgaggggcggttgatccacacattctgcctcccagggcttccggctcagggtttgcagaaaccagttttctctcgtgaaatgtcacagtgttaaacacaagtggtgcaagtcagcagtaggaggtccacacagaaatgtgggtcagagcaggaacttgaggcagtgcttcctgatgcaggctggatccacttccaggaatgtaagtaggaaagaagatagttgattgtggtgaactgttgggatatgcagatagctcagagtccttgtgcacaaaaagctggaaactgtgtgtccattgtccattgcagtgagattccatcataggcatcgtctcatcgatgtcatagagtcttcaagttagaagttcagaactctccagcaaaaggcaggggagtcttggcatttttcctcacgggttctcagtggtgaactgtttttaggacagttcaggcatcctctctgtttgcctttcttccctggatcgtagaaccctgcagcggtaatgaggcagtgaccgcagatgggccaagagtgtgggcaccactgaccctgggctggggggttgcgtgtgtgggacgctgggaaggacaaagggcggtcctggtgaagccccgacaggagggtcggtttcagtcttggccgcagtccctttggcctctccctatatgtgccactcagtaagcagcagtgtgggcggcataccctccagggcaggttctccagaaaaatctgactaagcgcctccactgcacttgcgtcactccttttgttcctgttatttctcttctgcagctaaacaagacaccatccagctccaagaaagtcacctttgggctgaacagaaacatgactgccggtaagtggggttttgccagcggcaagcttctctggagcacagctgcagctcctggcgcggctcgcagcctggttccacaaggcggtcggggaagaggggggtcctagctcctcactgcccatttctttatttttattttttttttttttttgagacagagtctcgctgctctgtcacccaggctgcagtgcagtggcgagatcttggctcactgcaacctccgcccccccaggttcaagcgattctcctgcctcaggctgccgggtagcgggtagctgggatcacaggtgcacgccatcacatccagctaatttttgtatttttagtaaagatggagtttcaccatgtcagccaggctggtctcaaactcctgacctcaggtgatctgcctgcctcggcctcccaaagatctgggattacaagcgtgagccaccgagcccggcccctcactgcccatttctgagtcagaaggaagcacctatgtgtctgtccctcatcctcaaagggctgtgagtggggtgccagtggtgagtgggcagccaattgcctgggacctgttaagagaagctacctggtgagacgtgatccaaaaagccgttttcccaagtgtctttctaaatactgaaagccgtcccatagagaggccatttgagatcgtagtgctccatcagctgtagctgtctctctgcgaaacttcggaaccacttgcttcttgggcgacagagaagggtaacccctatcttcctacttttcatattggtgccatccattcgagttgcttttacaaaggaaaccaaagttttaaaaagtagtataggccaggcgcggtggctcatgcctgtaatcccaacactttgggaggccaaggtgggcagatcatgaggtcaggagttcgagaccagcctggccaacatggtaaaaccccgtctctactaaaaatacaaaaattacctgggcgtagtggcaagcacctgtagtctcagctgctcgagaggctgaggcaggagaattgcttgaacccaggagatggaggttgcagtgagccaagatcgtttcactgcactccagcctgggtgacaggctgggtgagactccatctcaaaaaaaaaaaaaaagtattataacgaatttaggacctgactcttgttgggaactgcaagtaatagagagtatgtgtatgtgtgagtgtgtgtacatgcaccagtatatatgtgtgtgtgcgtgtgcatgcacacatgcgtgagtgtgtatgtttagggagaagagactctgagagactgaggagctcacccagcctttacaactggagaaaatgaacagtacgaatcctgcagctccacatagcacagatttgtcccagacacaaatgcctggttcactcattgtccaaaacacccccacccccaatgttcacccttccaggagccaccctaccagcagctccccttagtctgtgcaggcagccctgggccctcccttgggagggtgagttgaggcatgggatgtggcctcactgccctcctttcctcagaaggctcttgggcctgctctctgcagggccttgagatggccctgcttcgtcctagcaagtgggtggggtcggcacccaggcaggacgctgtctaaggtgttgaagggacagctgtcggacccacttaatatggggccttgctctcatttgggacagaattcaagaagacagacaagagtatcttggtcagtcccacgggcccttctcgagtggccttcgaccctgaacagaagcccctccacggggtgctgaagacccccaccagctcacctgccagctcacccctggtggccaagaagcccctgaccaccacaccaaggagaaggcccagggctatggatttcttctgaggagcagcagagtcccttgtaaaagactgcttttgtacagaatgcgctataaattatacctttaagaatgtggggccttttttatgattttgtaagttcccataagttgtgtgcacgaggttctgagagtgcccgcaggctgctgcgtcctggcccctctgtagtggctgcgggcgtcttggttgaatcttttgctacaaaccatgtttgcgtttgagctctccaggattttacatttttgggtaacctcagtgattcccattggtgtaggaaatgagaccctctctgaagctgaggagagcacgttgatctgaactttaaatcaatcagtgctgctggcacaatgaaaggtggaactgcacttctgttgagctctcagttctgcggaatttggtactcattaccgtattcgccgtactaagttggtttctgttagtcttaacagtctgttttcttttaaaagcatgtagggcttcattgccatgttctgtgggtgtttggcaggttaccgatggggaagattcttgtcacagaatcagcaataccatagtttttctacatgtgctcagctgggggtgtggacaggtaggggtggggaaagaagaggctctgcgttctgggggctttttcttctcctccccctacccggtttccctccctgttttcctacctctacggcaagcccaaagtgtcttcccgggagcccagcgcagcccccggctcttacccaggaccccgccccgtgctgagccttctgctgaggtccttgcgtggagcacactcattcctccaagcccttgcgctcccgtttctctctctctccgtccacgttccagccgagtcactgcctgaccggctccatggcagctccccatcttccctagaggctgcctgcgcatctggagcctgcgctccggctcagcgacctttcctctcaaatgcggaagcgtgcacttacagttcagaccgttctcctgtaagttcattacaaacacgggcggaaggcactcaggctttcgttggagaaacagaaataaggccttcttttgagcagcgattgctggatcattgatctgtttgaggaagtgtctgacctgggcctgagagctggagaaggtgcagattcaaagtgagcggctcctgaggagagccgccaaggctgctcgccttctccgtggcttccgcagctaccgtctgcacggtgagagggcacgggcacacggttcgggctggcgtgcagctctcccagccagccacgctctgctcaggcctggaagtgaaagccgcctccttcccgttatgccccccatacaggagcctcggtttttcagcaaaacgcggccagtccccttctccactgctgcctcccagcagagggccccaggatctccaaggtcccagctatggctttggacaacgtggcttcggcccctggggttgcagagcttgcattgggtttacctcggtctcattcattcatggagccaagggtggggtttcacctgcgaacatcagactgacttgctggcgtcaagagcagttgactcactgatgaaggccctggtgaggagaaagcactctgttcttcgcctactctgtaatcgttttgtcataatgagccatgaaaaaagtaatgaacttgtgctgttaatcgtcactgtaatgagaagtcttacgtacaacatagctgtggtggcttaatggctgcattagataggatcctcacatcccattcagaaccaaaactgatacagtgaaacaattaaggtgagcaaatagttttaacttttcttttttttttttaagtttcattcttcctagaatatttttctaacaatttttatttcagctttaaagatgggtcatatagccaaacgggccatataatccaacattgttgagatgtcttaggacatctaaggcaaaactggcacatttgttctgcagactattgcaggaatgttttttcctagcatttctatattatctgtccattctgaggaaccagtgaatgtcctataaatgcacctcctgtcaaaaccatgcctgagaggtcccggctgggagtgacagggtgcttcttagattctattggtccttctctcattctccgaacttactcctttttatgggtaagtcaactaggtttacagtcccttatttttaatgcctaagttttgacagcaggaagaaaacaattttttaaaaattctcattacatagacgcacaagaatatgtcacataaagaaaatgtgtttagaatactggttttctatttacgcatgatattttcctaagtaaaattgccaagtggacttggaagtccagaaaggaaaataatttaaattaatgctggtgatcttaacaatattttgtaaaatgatgcttcccccttctccatggtctagtcaattttgtacaattaggtatctgactttacaagtttgttatcctttctaatttttactgaactgaaagcacaaagaagactacacagaaaatctggaaacagttgcaggtgttgggaggaagatgaaatcgagctgtcttttaacttttgtatgtgttttatcagaatttgctggactatgctggcaaggactttgtttacgatcaaattgtactagtgtctgcagggtttgtcagtactcgtcaaagccaagtccaattaaaaaaaaaagtctttgccctccaatttgtgtttgatgttgactttcagtatgggtaaaaataggcctctttgggagctgttccagcacagcagagttgggaagatattggtgttggtcgggtttgaaaacaagactctgggtaccattctcttcatctctctgctgctgccagagccggtgggggcgctgctccggggatcgtctccaagtgcttgaagcaggcctcactgcgcacaaatgcccttgctcactatcgtgtctaaaacatcactccacaggcctacgcttgtgacgatgagcggagaagtgccagtgtcccgggtggagatctcccactgcagcccagaaactgactccagctagggtgaggcgggcacagggaggctgcagctgggtgaggcgggcacagggaggctgcagctagggtgaggcgggcacgggtgggctggtacccagcagacagcctgttctgggtgttggcagtgggtgtggtcagtgttgggcaagcagagtacaggcatggcggagtctttataggcccgtgttccccgaaacaaatttttcacctgttctttggatcccagacaagtccacagacagacactgaacaagcaagcaaacaaaaacaaaccctgggccaggcgcggcggctcaccccagtaatctcagccctttgggaggcctaggcaggcaagtcgcttgagtccaggagtttgagaccagcctgggcgacatggcaaaaccgtgtctctacaaaaaaaaaaaaaaaacaaataattagccaggcgtggtggcgtgcatctgtagtccccgctacttgggggcctgaggcaggaggattgcttgaacctgggaggtcacggcttcagtgagctatgatcataccactgcactccagcctgggtgacaaaatgagaccctgtctttaaaaaaaaaaaacaagccctagaggaagaaggaaatctgttgtaatgtattatttaaaatgtccagttttcaacaaaaacaaggtaagacattcaaagaaacaaaagagtgtcacatacacaaggagcagagaggcaatagactggctttgagggcacccaggtgctgatcttagcagacaaacttcaaccagcccttatcaatatgttcccatcactaaaagaaactatatttaaagaaataaaagatggggccgggcgcagtgtctcacgcctgtaatccctgcactttgggaggccaaggcgggtggatcacctgaggtcaggagttcgacaccagcctggccaacatgatgaaacccccgtctctactaaaaatacaaaaattagccggggaggctgaggcaagagaatctcttgaacctgggaggcagaggttgcagtgagccgagatcgcacccctgcattccagcctgggcaacaagagcgaaactcctgtctcaaaaataaaaataaataaaagataatatgatgacagtgtctcaccaaataataccaataggtatttttaaaagaaaccaaatagagatatagacgttaaaaagcacagtaagagaaatcaaaacttcaatagagttgagaccctctagtgaagtttttatttcagttattgtagatttgaggcggtagaagaatcagcaaacttgtagattaatagaaattatgtaatctgaaaaaaaaaaattgatgaacagagcctcagaaatgcaggaccgccaagtgccacagcacacacagcagcaggaccacaggagaaaaaatactcaaaaaactcatggccaaaaacttgccagctttgagtttatcttccttggagtgtgtagagtttcttagatgtgtacactgatcaaaaactgcacacatctaagcaactccacaccctcccccaaacacagctgaaatgatgaaactcaaaatgttgaaagagaaaacttcaaagcagccagagaaggactcatcacatacaagagaaccccaggaagattaagattttttttaaacctgattcagattttttttttgacttctcatcagaaaaaaaaaaaaatacactgaaggcagggatgagatactcaaaacgctgaaagaaaaaagccaagagcccttcttaagttgaggtgaaattcacataacctttttttttttttttttttttaagacagtctttgtcacgcagtctggagtgaggtggtgtgatctcggctcattgcaacctccacctcctgggttgttcaagcaattcttgtggcttggcctcccaagaagctgggattgcaggcatgcgccactacgcccagctaatttttgtatttttagtggggacagggttttgccatgttggccaaggctggactcgaactcctggcctcaagtgatctgcccacctcggcctcccaaagtgctggggttacaggcgtgagctgctgtgccgagtggcataatcattgtttaaagtgtacagttcagtggcatttagtgttgggaaaagggcttgtggaatgcctgtataaactggccatgaaaatatgggacaataagttgtggaaagccacaagaggcctctgaggaggaaagcctcctaatcgccatcatgttcgcatgctcagagtgagacccgctcttatctgtaaacactgtgttcaaggagaaggacactcctttgaagcactggactgtggacagacacacgagctcctggttaagcccgctcccaccagctcctgtccgataagttaaagatacgctgtttgagcacaaaggagattcattgaaaccggtattgctgtagattacgcctatgacgcactgcctccctttcactgtttcgccctgaacatctgcttctcagatctaagtgactgtactcaataaatagcgtggagaccagagctcagtgccttttgcagcctccattttgccactggccccctggctcctacctttatgaactcttaacctgtctcttctcattcctttgttgccaccgaacttcgggtacgctgtgggtggtgttgaggctggtctccaacatttagtgtattgacaatgttgtgagaccacacctccatctactgcaggcatttcatcaccccaagagaaggcccgcactcgctgagcagtcagccccgctcccctccgtgccagcacctggcagccagcactttgtgtttctagatatttcataagtgtggactcgtgctctatgtggattaaggttttgccaaacgtgtcacctgtcccccctggtgtgaggatgtctctgaggttcctgagagactgggctggcagaggatgtgcatgtttcgttttagaaggtgccattcccggccgggtgcggtggctcatgcctgtaatcccagcactttgggaggccgaggcgggcagatcacagggtcaggagataagaccatcctggccaacatggtgaaaccctgtctctactaaaaatacaaaaattagctgggcgtggtggcacatgcctagagccccagctactcagtaggaggctgagatgggaggatcgcttgagcccaggaggttaaggctgcagtgagccatgactgcaccactgcactccagcctgggcgacagagcaagaccctgtctcgaaggaaaaaataaaaataagttatgggcaatatggcattgtgtcctcaaacactccagcctgcattaccaggtgacattcctctctataactacatcgccatggttacaggaaaccaacttagatcaaggacatcttcacacaagttcacgttcaaatttccccctagttgttctcaaaacattttttcttaccgggaaataaccaaggatgtgcagtgattcttgtctaaagtctctcttccagagtgtctgcccctcattttttctgatactgcattcttgaagagtgtgtataactttgaccccgcagcccagtgggttgcttctgattgccctggggatgatctagcagggttgtggcctgtccactctgtcacagggacccctgtgtgggaagtcctggacatccaacgcccctgacagtgctcagcccctgattgacggcctggttgctatgacaactccaacctcagctttccagctttctctaggaagggataaccccccttggcccagcatcaggacccaaatccagagctcacaggctggtttccccgacttggtcctagtgcagctcagggcagcacgtgggctggcgtcttcctgtgtgtccaggcgggcagcccgaggaggcctgttgtaacccagccagagtgctgagccggcaccgtggggacacagcagactccaagaagacatcatcttctccccagagctcctgcttctcaagcacaaattgtcatctaactttagtctctaaactgtggatctacctaggaccacagagatcaataaattccagggttagcacagcaggcagcagacacatggctggtttttgcagcgcctgagaataaactattattgtaccaacttcccagctacgtaccgcttttctataaatgaaacataagccaagccaaagttttgtttaaaaacataaagctaaatgcagaaacatgactggatttaggtttgttttctgagcctacaaagcctgcaggaaccaggacattgctgctgcctctgaatgttccgttcctgctttgaagttcccagggactccggaaaggaggggctgcctgcaaagttacagaacgccgacccccagtgccccgaccagaacgcacgtgcacactcacatgcaacagctgcagatggccgggcgcagtggctcctgcctgcaatcccagcactctgggaggctgaggagggcggatcacttgagctcaggagttctagaccagcctgggcaacatggtgaaaccccaactctaccaaaaataccaaaaaattagctgggcgtggtggtacgcacctgtagtcccagctcctcaggaagctaacgtgggaggattgcttgagcccagtgggcagaggttgcagtgagccaagatcgcaccactgcactccagcctaggtgacagactgagaccccatctcataaaataaaaaaaaaaacaaaaaaccacacacacacacacagctgcagccaggtgagggccccatcctcggacgcacccacacactgactcactgaaggtgggtgcagatcaaggagtcccaggcactctctcctttgataaaaatgcttggcacgcccgccgagtatccaggcagtgccaggcgctgggatacaggccagaaagacaacagggactgcttggagtccagggaccagagaggagatgagacctgcgacaccatgcaagccacagctgtcactttcaatttccttgcacactttttgttttgtttttgagactgagtcttgctctgttgccaggctggagtgcagtggcgcaatcggctcactgcaacatccatctcccggattccagcgattcccctgcctcagcctcccgagtagctgggattacaggtgcgcaccaccacacctggcttattttttttttgtattttagtagggacggggtttcaccatgttggccaagatggtctcaatctcctgacctcatgatccgcccacctcggcctcccaaagtgctgggattataagcgtgagccactgcacccggctgtagacacattttttaaaagagaaaaagaaactgtcaatctttttaaataatgtatttccaaaatataatttcaacacgtaattaatattaaaaagtattaagatattttgcaggcttttttttctgtagtaagtttccaaaaccaggcgtgtatgctgatggcacgcgtcgcctggcactctggagtcacatgtggttgcagctatgatattggccatggcgattctacagctaaagccgagaggaagtttgtccagagaacaagtcggggtggggatctcagtagagggaaccgcacctgagtagaggcacaaaggagggaacagccagtgcagccaggatgtaggggggctggccagggacggccatgggggccgtgggggccgtgggcagggtttgggctttgtcctgtgcacacttcaggagccactggagagcacccaccaggcagcaggggaaggaagggtcagaggcccggatggaccagaggcgggagggcagccaggcctggggcccacacctgggctcagcgggcaggatcggaggaccggcttctggttgatgtggggagggcccagggagaatggggaaaagaagacagggaggtttccagagcgtgtcggcctctctcctcgtttcctgatccacctcatctccatgggcacgttttccttctgagaagagctgggaagcccgtcagcaggcgggcctctgtcctcacctccactaacctggcccttgcaggcgtcccaggcttccagggccagccccctggggtttggcaccctgcagcctctgactttctcttcactgctcctttgggagcacgtgccagaagagacactgcctccgtggctggcacggacgacgacgcccagcaggcagctgtctcaggaggacaggcccagctgcaggaaagggcagccccgggcttctggcaggggctgaggcagggaggccagccctacctgggggctggaggtggcgttgagtgggggtgtagggggtccgcagacggcagctgaagccccttctctgcaggttatgctggtgcgattcccttttaggaagtagagtccgtgtggagagaacggtgagccgcctgcgtcctgttgcgattcagcccctgtgtcttcccggagggccctgcgcccgccttttgttcctaggactcggtgcctttctgaacccagtctaaaaattgccgcagctctttctggcgttagtcactgcctggtgattaaggcttcagtccgtcaatctttaaatcctacaattatttctccacccaggtttttaagaataaaagttgaaaatgtactgaactgacagctaccggatttgattcctatttgattcgtacctttcccgagtggccccgatcgccaccgcagcgccacgtcctggcaaatcattcacgccgaccttgagaactcagcagaggtgcagactgacactcagccccgccccctatcacgggctttctgcgggtgaaaggagacgttgcttttgttccccacaagcaactgcaggcagtgctacttatttttaacacagttgagcgggcaactttatcttaaatgattatgtgctgaaatctgctgatgaaaacgctataagatgggcatgggcaggggtggccgccagatgtgttctgcgtgacagctttttctgaacctgctggacaaagtccccacttgttgcccgctcagccccggtcacagccccacctcgccggggcttgtcttcagttcctcacactgccacgctcttgacccactcattggcctctttgtggggacccttcagccagaaggcccttcccctttcctgcccagctctggcccagacctgccacatggaggctgttagaggtggaatgtctgaggcctccaaatgcatgtgttgaaacctaatccccagagggatggtatttggcgatggagtttcccagaagtggcttggtttgtgctggctgctatagcaagtacagtcatgggtcgcctagtgagatctgttttgagaaatgcatgctcgggcgatatcactgtcgtgcagacctcacagcattcactcacacaaacccggctagcacagcccgtgacacacctcagccctgtgctgtaacctgctgttcccaggctacaaacctgcagagcatgtcactgcaccagatactgtgggcccccttgacagtggtgagctcttgtgtatctaaatacagaaaaggcataaaaaataacgtgccagccgggtgcggtggctcacactgtcatcccagcactgtgggaggccgaggcggttggatcacctgaggtcaggagttcgagaccagcctggccaacatggtgaaaccccgtctaaactaaaaatacaaaaattagctgggcatggaggcacatgcctgtaatcccagcttctgaggctgaggcaggagaatcgcttgaactggggaggcggaggttgcagtgagccgagatcacaccactgcactccagcctgggtgacagagcgagactccatctcaaaaaaaaaaaaaaaaaaatacggtgtcatcatgtatgggactatctatgggacttgtggcacttgactggaccataaactgcttataaacaacagaaattgatttctcaaagttctggaggctggaggtccaagatggagcaccggcagatctggtgtctgggagaggccaggcagctctttggggcctctttcacaagggcacaaatcccattcctgagggctccccgcaacgacttcatcacctcccaagaccccacatcctgataccctcaccttgggagttaggttcaacctatgcatttggggggacacactcagtctctagcagttgggtagacccaagattgccctcaggagctcctttgggaggcgctctctattgggtccagtgccaagaaaaaatatctgacttgtattttgtagaggctatgttattaaaaaaatacatctttaggttgggcacagtggctcaagcctataatcccagcactttgggaggctgaggcaggtggatcacctgaggttgggagttcgagaccagcctggccaacatggcaaaacctcatctctactaaaaaatacaaaaatcagctgggtgtggtggcatacgcctgtattcccagctactcgggaggctgagggaggagaatcccttgaacctggggagtggaggttgcagtgagccgagatcgcgccagtgtactccagcctgggcgacagagcaagactccgtctcaaaaaaaaaaaactttaaacatgagagagcctctcagcttgacagcactcctgcggtcacaaacacagacgcggccacgaaaaagaacgagatcatgtcctttgtagcaacatggatgcagctggaggccactgtcctgagtgaatcgatacaggagctaaaaaccaaataccccatgctctcagttacaagtgggagctaaacatcggcgcccatggacataaagaccacatgctctcagttacaagtgggagctaaacatcagtgcccatggacataaaagaccgcaacagtaaacactgggaccaccagagaggagagggagggagcggggaagggctgagaaaccaactgccggagactatgctcagtacctgggtgcaggatcattcgcaccccaaacctcagcatcacgcagtatacccaggaaacagacctgcacctgcatccctgaattaaaaataaaagttggaaaagaaaaaaatagactgggtgtggtggctcatgcctgtaatcccagaactttgggaggccgaggcgggcggatcacctaaggtcaggagtttgagaccagcctggccaacgtggcaaaaccccatatctactaaaactacaaaaattagcccagaagggtggccgatgcctgtaatcccagctacttgggaggctgaggcaggagaattgcttgagcccaggaggcggaggttgcagtgagccaagatcactcaactgccctccagcctgggcaacacagcaagattctgtctcaaaaaaaaaaaaaaaaaagaaagaaagaaaaagaaaacaaatacataaatagtcagaataaatagctctacgagttaaaggtggtccctgtatcaagaatgagacatgcagatggagagcctgctgaagggaatgctgttttccattaaagatcttattattttgctttaaaaaattgtttgcatcattagatagaaaataaagtttaattgaaaaaaataagatttctataaggaaaacactaacatagggccaggcgtggtggctcacgcctgtaatcccagcactttgggaggccaagacgggtggatcatctgaggtcaggagttcgagaccagcctggcagacatggtgaaaccttgtctctactaaaaatacaaaaattagccaggcatggtggcacatgcttgtaattccggctactcgggaggctgaggcaggagaatcgcctgaacctgggaggcggaggttgcagtgagccgagatcgtggcactgcactccagcctgggcaacagagtgagaccctgtatcaaaaaaaaaaaaaagaaagaaagaaaaaacaaacataaaaacgaatttgaggccaggtgcagtggctcatgcctgtaatcccagcactttggaaggctgaagcaggtggatcacctaaggtcaggagttcgagaccagcctggccaacgtggcgaaaccccatctctactaaaaatacaaaaattagcccagtgtggtgacgtacgcctgtaatcccaagctgctcaggatgctgagtcagaagaatctcttgaacccaggaggcagaggttgcagtgaaccgagatggcgctactgcactccagcttgggcaacagagcaagactctgactcaaaaaaaaaaaaaaaaaaaagaactgtttgcatcattagataaaaaataaagcttaattgaaaaacagtatgatttctatcatataaaagcaaacatagaaaatgagtcgtatggcaaaccacagccttgctcccgacatgcctcacgagccccatatacccacagaggccaggagcagccagactcactggctttacagtttggttttgtttgttttaacttttttgcagagaacggggtctccctatgttgcccaggctggtctcgaactcctgggctcaagcaatcctcccgccttggcctcgcaaagtgctgggattacagacataagccccgtgcctgaccggctttatagtcttttttttttttttttagacggagtctcactctctcacccaggctggagtgcagtggcgcaatctaggctcactgcaagctccacctcccgggttcacacattctcctgcctcagcctcccaagtagctgggactacaggcgcccacaaccacgcctaactttttgttaaattagcacaccatgctaattttttgtattttttttttttagtagagacggggtttcaccgtgttagccaggatggtctcgaactcctgacctcgtgatccgcccgcctcggcctcccaaagtgctggaattacaggcgtgagccaccgtgcctggccgactttacagtcttaaacgggttgttgtgctccctttttcttgggtgggggggtttgcacaccttcagttgaattcgtgcaagttagaagagattccaccatagtgaaaaagtggtgactctacctaaatgtccattaactgagaacacagctggctgaagacagccacagaatagtcatatactggagtaaaatgcagtcacaggctgggcgcggtgggtcacacctgtactgtctgcactttgggaggccgagatgccaggagttcaagacaggctgggcagcagagtgagccctgtctgatatagcttggatattggtccctgcccaaatctcatgttggaatgtgatccctggtgctggaggtgggacctgatgggaggtggaggtcatgggggcgactccctcaagaatggctggggccatccccttggcgacaactgagctccctgctctgagttcacaggagaactgggtgtgtagaagtgtgtggcacccccacccctcactctcttgctcctgcttttgccctgttgcggcgcctgctccctgctcgcctcccaccatgagtgcgagctcccaaggcctccccagaagctgatgccagagccaagcttcctgtgcagcctgcagaaccgtgagccaattaaagctcttttctttataaataacccagtctcaggtatttctttatagcaatatgagaacagtctaatacactgtctctacaaagaaaattacagaattagctgggcatggtggagcatgcctgtaatactagcatcttgggaggccaaagcaggaggatcacttgagcccaggaagttgaggctgcagtgagccctgatggcaccactgcactccagcccaggtgacagagcagaccctgtctcaaaaaagtaaaataaaattaaacgtattagcatatgaatatctctactttattttgctgtttatttttcttttttcagcaggtgagttggtgcacaccctatagccgattccagctgtgtggtgccgtcctgctgttatgtgattatttacaggagagttcacttggttcacatcaggggtcactcatgatgggcccttctctgggtctgtcaaatgctaatctcatgtgcagaccatcacagtgtccttttccggccctaaagcccgctgtgcttctcatatccatttctttcccccttgaccatcacagtgtcacacaaagtcgttttctggccctaaagcccactgtgcttctcctatcctttcctttcccccttgtcctaaccttctgacaacacctgaccattttctttttttggagagagggtctgctctgactcctagactggagtgcagaggcatgatcttggctcactgaaacctctgcctcctggactcaagcaatcctcctgccttagcctttctcaaatagctaggtctacgctacaggggtgtgccaccacacatggttaatttttgggttttttttgttttgttttgttttgtttgagatggggccccactatattgtccaacctggtcttgaactcctgggctcaaacatccacctgcctcggcctcccaaagtgctgggatgacaggcatgagccaccgcgcctgctgggatgacggcatgagccaccgcgcctgctgggatggcggcatgagccaccgtgcctgctgggataatggcatgagccaccgcgcctgctgggatgacaggcatgagccaccacgcccagcctcctgaccttttaattatctccatagttttaccttttccaggatgtcacttggttggagtcacacagtaggcagactcttcagatcagtgtctttcacttggtaatgtgcacctaacgtttcctcactatcgcttcatggcttgatggctcactctttttcattgctgtataatattccattgcaaatgtacactacagtttgtctattcattcacctactgagagacaccttggtggcttccagtttttgacaattactaaagctgctataaacattggtgtgcagggttttgtgtagacataagtttttaaccctttgggtaaagatcaaggagtgcaactgctgaattataaggtaagatgtttagtttcttttttctttctttcttttttttttaatgagacggaatttcactcgtgcagtggcatgatctctgctcattgcaacctctgcctcctgggtccaagcgattctccagcctcagcctcccgagtagctgggattacaggtgcctgccaccatgccaggctaatttttgtatttttagtagagatggggttttaccatgttggccaggctggtctcaaactcctgacctcaggtgatccgcccccacctcggcctctcaaagtgctgggattacaggcgtgagccaccacgcccggccaagatgtttactttctaagaaaccaccaaagtgccttccaaagtggctacaccattacagtgttcccaccagcaatgaaggagagtgccatgtcccgccagcacccagtgttgtcagtgttctggacttcagccattgtaagcagtgcttagcgatgtttcattgtttgaatttgtacttttctcatggcatggcgttcagaactttccatatgtgtatttgccatttgtatatcttctttggtgaggtgtctagatcttttgcctattttttggttaggttgttcccttattgttgagttttaagaattctttcgccagttgtggtggctcacacccgtaatctgagcactttgggaggccgaggcaggcagatcacttgagctcaggagtttgagaccagcttgggcgacatggtgagacctcttctctacaaaataaaaaaagagtacaaaaattagcccggcatggtgacacacgcctgtagtacccgctactcaggaggctaaggcgggaggatcactttagcccaggggacagaggttgcagtgagctgatgtgtgctactgtactgcactccagcctgggtggtagagcaagaccctatttaaaaaaaaaaaaaggaaaaaaggctgggcgcagtggctcatgcctgtaatcccagcactttgggaggctgaggcgggcggattacttgaggtcaggagttcgagaccagcctggccaacatgataaaaccccatctctactaaaaatacaaaaattagccgggtgtggtggcaggcgcctgtaatcccagctactcgggaggccgaggcaggagaatcacttgaacctgggaagtggaggtgtcagtgggccaagatcacgccactgcactccagcctgggcaacagcaagacgaaagagaaagagagaaagggagaaacagaggagagaaaacaaaggaaggaagggaaagaaagaaaagagagaaggaaagaaagagagagagaaagaaagagaggaaagaaagaaagaaatccttgtatatttaggactcaaatcctttattgatgttttgtacgatttaaagattcctttggtggtgggacgcaatacagtgacactcagctagaggagaggcagaagcctgtgtattgatgttttataagatctaaagattcttttggtggtgggacgcaatacagtgacactcagctagaggacaggcagaagcctgtgtgacttacagctctaacaagaggccgccgccaggcagggtcacacgggggattgtgcctcggacgtcagtggactggacacagcccaggagagaatctgcaagctgaggacatgtccatagacttccccaactgaaatgcaaggagaaaaaagagtaaaaataactgaacagaatatcctagaactacgggacaattatagaaggtaatttacacactcataatggcaataccagaagaggagagggagaaagggatagaagaaatatttgaagtaataatggcttctcatttttcaaaattggtgtcagacaccaaaccacagatctaggaagcttagagaacactaagtacaacaaatgccaaaaaataggaactttggcatgtcgtattcaaactgcaggaaaccagagacagaatatcttgaaagatgtcggagggaaagtaccttcctatagaggaacaagaatacggatcacactggacttccatcaaaaatcatgtgatctgggtactggaagctacatgtaaagaagaaattcatgctcacgcctgtaatcccagcactttgggaggccgaggcgggcggatcacgaggtcaggagatcgagatcatcctggctaacacggtgaaaccccatctctactgaaaatacaaaaaaattagccaggcgtggcagtgggtgcctatagtctcagctactcgggaggctgaggcaggagaatggcgtgaacccgggaggcggagcttgcagtgagccgagatcgtaccactggcactccagcctgggcgacagagactcggtctcaaaaaacaaaacaaaacaaaaacccaaaagaagaggcacctgagccgcttgcttgagcctgctcccactctgaaatgtcttcagtaaatctgtgctttccttgcttctcctgttgctttctctttcatggcttggctcttttgttactttgtgcattttgttaaagcatcccccgctaactaagacaccgctcagggtcgggcacagtggctcacacctataatcccagcactttgagaggccgaggcaggtgggtcacctgaggtcgggagttcaagatcagtctgaccaacacggagaccccatctctaccaaaaatacaaaaaaaaaattagctgggcgtggtggcacatgcctataatcccggctactcagaaggttgaggcaggagaatcacttgaacccgggaggcgagggttgcggtgagccgagatcacgccattgcactccagcctctgcccaacaagagcgaaactccgtctcaaaaaaaaaaaaaaaaagaaagaaagaaaaaaaaaagagacaccgctcaaacttctggccaaacacaaatcctgaatgacttttaacatcctttatggtaattaaggaaccctgtggtgctgggaggcagttgctcaaacaacctctgggcatggtctgctggcaagggcatttcatttgccgccagggtgtggacggacatttatttacacagtcatacctgagacagagtagggacgggctggctcggttaaccccccactagagcattctctcatgccttccacggatcacacaccccacgccactacctggcttgacaccaaactcgctaaccctgagactttggtcatacaaggaaaacagccgtttatagtgctcttctgtgctcttgtaatatttaaccaggccttttacttaaagaatttcaggaactggccttaaaagatccagaatatcaaccaaggttgtagaatgtccccaccttggaaaggaatgctgagcaacagatttacagcctcgctgccccagccagccagctagctggcccatgactcaaaataaccgtcgcaaccagaagtgctgatcagcctgtcccagtcctcggaggccttccccagcccagcctgcacaccctaccctgatatcagtttccaccctttgcctgacaaaaagtcctaaccaactcctttccaggactcagtcagggactctctctcccttgggccgcctcccttatgcctggacataagctccaatgaagccttgtctgggaaaactcttttggccccatgtcaatttccattgcattgagagcccaagaactcatggttggtaacatatccattcctgtgtccaaatggaaagccttctattttgttttgtattttattttattttttgagacaggttcttgctctgttacccaggctggagtacaatggcacaatgatggctcactgcagcctcaatcttctgggctcaagtgattctcctgcatcagcctcccaagtagctggatccacaggcacgtgccaccacgcctggctaattttttttttttttttttagcagagatggggtctcactatattgcccaggctggtcttaaattcctgggctcaagcggtcctcctgcctcagccacccaaagttctaggattgcagccatgaactactaccactggctgaaagcaagctttttttttttttttttttgagatggagtctcgccctgttgccccaggctggagtgcaatggcaccatctcagctcactgcaacctctgcctccccggttcaaccaattctcctgcctcggcctcccaggtagctgggattacaggcacgtgccaccacacacagctaattttttgtatctttagtagagatggggtttcaccatgttggccaggctggtctcaaactcctgacctcgtgctctgcacatctcagcctcccaaagtgctgggattataggcatgagccaccgtgccaggcaaaagcaagcttttaaaaaaagtattgataacatgacgtgtggtcaccataaccatggtcatgtaaaacaaaaataaaattctgaggccccccaaccatctgaatggacttcctcctcagccagggaactctgaaaatttaacctgagagactggttcaggccatgatgggaagtggggatgggatgtgccttattctacctctccagcattaacatcaatgcagacttcaagtctgataagaaacatttgacaacccattctctctaaagcctgctacctgaaggcttcctttgaaagtaagagcttcagtctctacaatcgttgatcttaacagacgttcctttctattgatcccaggtctttttttcttttttttttttgaggcggagtctcgctctgtcacccaggctggagtgcagtggcgtgatctcggctcactgcaagctccgcctcccgggttcgccattctcctgcctcagcctcccaagtagctgagactacaggctcccgccaccacgcccagctaattttttgtatttttagtagagatggggtttcaccgtgttagccaggatggtctcgatctcccgacctcttgattcgcccacctcagcctcccaaagtgctgggattacaggtgtgagccaccgcgcccggccagtcccaggtctttaaataaactcaaccaattgtcaaccagaaatttttttttttttttttttttttgagagggagtctcactctgtcgcccaggctggaatgcagtggcgtgatctcggctcactgcaagctccgcctcctggttcacgccattctcctgcctcagcctccgagtagctgggactacaggcgccaggctaatttttttgtatttttagtagagatggggtttcacatgttagccaggatggtctcgatctcctgaccttgtgatccgcccatctcggcctcccaaagtgctgggattacgggcatgagccaccgtgtctactctgtcaaccagaaaatttttaaatctacttataagctggaaatccccccaacccccttcaagttgtctcacatttctggacaaaaccaatgtattttttttttgagacagagtctcgctctgtcacccaggctggagtgcagttgcgcgatcttggctcactgcaatctcctcctcctaggttcaagtgattctcctacctcagcctcctgagtagctgggactacaggtgcccgccatcatgcctggctaatttttatatttttagtagagacagggtttcaccatattggccaggctggttttgaactcctgaccttgtgatcctcctgccttggcctcccaaagtgctgggattacaggcatgagccaccattcctggcaaaaccaattttttttttttgagatggagtcttgctctgtcgcccaggctggagtccagtggtgtgatctcgactcactgcaacgtctgcctcctgggttcaagtgattctcctgccttagcctcctgagttgtcgggattacaagcacacaccaccatgcccagctaatttttgtatttttagtagagacagggttttgccacgttggccaggctggtcttgaactcccaacctcaggtgattcgcccaccttggcctcccaaagtgctgggattacaagtgtaagccaccatgcccagcccaaaaccaatgtatttcttaaatgtatttgattgaagtttcacgtttccctaaaatgtctaaaaccaacctgcaccctgaccaccttgggcacatgttctcaggacctcctgaggcctgtgttgatacggacaggagacagggaaatactgggtagaagagggcagttccctgggaaagcccccgccctcaagcctggaaacccacggccctaaatgggaacaggcattcctgtttttgcacccaaaagttgccttttggtctgccatgtcccccgtcctgtacccatataaaccccaaatccctgtctccatgaggagacaaacagaagagcagaaggatggcagaatggtggggcagagagaaggagtgtctgaacaccaagaggagttcagctgggggacggtcagaggggagatcagctgctggacggccaaactccaagggaagatcatcttcccactccatcccctctcagctccccatccatcccactgagagccacctccaccactccataaaacccccgcattcatccttcaagtctgtgtgcgacttggttcttcctggatgctggatgaggacctgggtaccaagagggcactggctggttaagatttaagccatctgcagatggcaaggctaaagagtgcactgtaacacatgcccgcttgggcttcgggagtcgcagacacccacccctggatgctgctgtggggctggagcccaggggcactcatccccgctcctgcacctgcccgtctctgtgctccccctcctgtaaggggtttgaacatgcatggcggctcaacagacaagtcacacccttgttgcacatcctgcaagaggggtcagggaactctcccatttcagtgtcatgggccatggtcactgataattggcttagaataaatttctttcaatattttacagattttgactctttttgttgacattttccaaggttcaccgtcctttgagggcacactgtgttgccaccataactcagctggtcatgcctcgaatgctctggtggaagacccgcttggtgtcagttctctcaggtcctctcttttctttctcagtgaatgactttctggacaccatctccaggaccccgtccacttgcctccccaggtggaacccagctctgggtctctccaaccacttgttccctaggggagcctccctggccaccacccagctgggggccacccctccagggctctctccctggaaaggctgacctaggggtacaggctggggtggcagcccacccaatcgaagcgaggcatcccattcgtctcctggactgggcatcttttcagtagactcgtagtgtctagaaggtctttactatctgagtcatcaaggaaaaagctttgctcttggactgataattagtggcaagtgacatgtgctcataaaaacaccaaattagctcatctgcccacacagtgcctttcacccttgggtggtctcagaagcacctgcagagctaaaaaggagctcagcgccaggctcagtgaggtaggacagggctgggcctaggtgtgtgtatccagttccctgggtgactctaaaatgaccagtgtgagaaccacaggcactggccatctgcacaacagctgggaacgggcaaccagatctttgaaaagcccaagaaaccacaggcaaaaatgtactcaccacaatgacattttcagagtttcgatcagagccctctgtcgagaaggagggtcctggagcccacgggcctggaggctggtcagctctcttccatgcctcccctgctctttcctcttagtgcttgggaccaaaggtgtgataggatggggggggtgggggctggggatggggaagggaccatggatgatggatcaaagtgtggaaggacgaaatccactgcagagagagagattcatcaggcgctcctaagagccaagggcgagagactcacagagtaggatgagcaaagggtagtaagggcagttgttggtgctgcctttgtaggttcctggggctctcacccagcactgcttgtcaccaactctgtaacctctgacttctccttagtttgttaacttcacaatctataagtttgggaaaggacaggagaatttatttcttacaaagggttacagcctttaaggtgatgagacgggagagttccctggagccttttgctggacttgtgataggggtgtggcttgcttacctggcaccacgctctaactccttgtgggaggggaagcacgcaggcgagtgggtgcgagggccaggacaagcgcttttggactccagcctcgtggtaccatctaggggtgtgttacaattaattctctttattttattttattatttttttgagacagagtctctcactgtcacccgggctggagggcaatggcgcgatcttggctcactgcaacctccacctcctgggttcatgcaattctcctgcctcagcctcccaagtagctgggattacaggtgcacaccaccacacccagctaaatttttgtatttttagtagagatggggtttcattatgttggccagactggtcttgaactcctgacctcttgatccgctcaactcagcctcccaaagtgctgggattataggcgtgagccaccgcgcccggccaatgttagctattattaatggacaattatgactaattatgaagtactttcttttaaaagcctagatctctaagtaatgtcttcctccctcagtcctcagcacccgcctggtcgggcattgggtctcaccaagctacagagccctaggtgcgctgtgttaggtcaccaagactttagtctggtgatactgaccccagggccccaaatcaccatgtctgcaagtctggaacccaaaggcctccgttccccggggtggtgcagggaagccgcagggagtgcgtcagctgtggagagcgtaggggtgggaagtgaaggctgtggggtcccccagggggtcaggttcgtcctcgaaggcaggccctccacaggaagacctggttggggtgggatcggacacgcggcccagacccaggcacctgtggatggacggccgggcatgtggccatcggctgggggcctctgcaggccgcgccaccagagtgggcactcagggtccgcaagggtctggggcgcccccagagaagcccgccgccccaggccggtgcggagttgactgggtccccccggccccgtgtctgtcagctcccgcgcggcccctgggaagggacgcggatcggatgcgggctccgggccctgcaggcagttgagagcgcggttcccttgggtatccggggtccggggtcactttcgcgcctccgcactattcccacgcccgcgcgcactctcgtggccatccgcgttgcgagagtgtcgcgcccggaggtcaggggcgtggagcccgggcccccgagtctcccctgcgtgcggcggggcgcggggcgcggggcgcggggcgcagggctgaggcggagcacaatggttgaatgaatgaatgaacgaacgaatgaacggcgctgcagagccctctccaggcggaatgaaagtgcaaacccagcgtttcgggcggcagagtggcgggggccacctggcgcggccgcgcggccagggtccggtttcgcttcctcccagcccgggggcggggcctgcgtggctgtccccgccccggtccgcccccggccagcccccggcgccgcgcggaactcgcgggttcggagccgcccgctgaggtcagaaggaggcgtctgcgctgatcgggtccgccgcgcgccagagccagagtcgcagccgaggggagccggggccggagcccgagcccgagccgagccggagcccgagcgagcggcggagaccgtgcccccgcctcggccccgcgccgccgcggccaggcccggcatggaggaggagtgccgggtgctctccatacagagccacgtcatccgcggctacgtgggcaaccgggcggccacgttcccgctgcaggtacgcatccgcccgcagcccgggcttacgtaacccgagcccgtgaccttggcggggctgcccgagacgagcctcagttccccgagggaggctcgggagctgcgggcagagcctggcgcgggcgccctggaggcaggcgcgggatgagcctcccgctctgcttggcttgcgggggcggaagcggagggctgagcgctctgcgggcccctgcgggtgggacgggtccggcgtcggggtacgcgggtaggagggagccctgtgcaccagctatggcgcagccgctcgtcctcgccccttcccgccgaccgggccaactgccgcgggggcgggcgggcggtgcggctcccggaggcgaggaaatgtcgcagagccccgaggagtcccggagcagtcacgcgagccgggaccttgccccgctggaacgcagaagcggccgtggagctcgagacgctcgcgcgctcacctcctgggcccctgtgcgtggggaagtcaggaagaagacgccgagtgaggtcacggtgcccacgagggtggattcccctcggcctgaccacgccaggaggtggccgaagggaagagggtggggcaggggctgctctgcaccctctagcagagcggcatccctgcaggtgtttgctctgacgaggagaagccccagagagcagttcgggactgtgcggattggctttagggagccagcttttaaaacgcgttggcccacggcctcctggttgcagctaagtggcccgtggaggggtaggagaggcctgggtgcagtggcgtgggtgtcacgcagggccgaggcagaaccaggacgacgggcacttcctggccttgtcgagtcagcaggagggctgggggtgccctgccgggtcgtgctctcctgtgctgcccacctgcggcctggtcactggggacgggagcaggtatgcctggtccctgtgctgggccccacgggatgtaaagaagggccacctgggcacggcggggcctgcggtgcgggctggcctgggaggaggacaggaagaggggagcagagcttcagtggaatttgagggctgacctaggcgtgcccccaggaggaccaagctgagcagagttgagcgtggaaaggcagggggttcgagtccgaagtaagtggaggtcctgttgggaaggatgcggtgcttcacaggtggtcttacttgagaccctgttccatccagctgcaggcagaccctgcctgggacagtcagggtgcaccggttctgtggctccggctcttaagcactgctctggaccactcctagcttgagggggttgggggaggtcaccacaggctggcggattgcttgggcagagtcagaggtaggattgggcttgggaagaaaggtgcagggtgcctgaagcaggggcagccaggcagtgtggaaccagggggctctgaggacagcgtccactctcttggcagaagtgtgcaggtcctgctgtgtctgtcccgtccctcctcccatccacctcctacttcattgggcaaactgtttccttctttggctcactcgggatcccccagcaatgtcctttgttctcgaactcccagtgactcgaggggtgtcctctgattgctcacctcaggtggagcctcgaaaggatggcgctgctgttcctacctcgggtctccccagtgcacggcatccttacctgtgggctccacagggttccatgcaggcattttgctcccataccccgatgtccaagcccggctggacaaggagaagcaatgtgatgaccgaggggctgagatggctggagacccagcgagcctggaccagccttagtgggcacaggagggaatgggggacagagcctggaaatggccttggggccagtgtttgccgcttctagctgcagttccaaggggacgtgtccccaaagtctagagctgctcttgcaagagtttgttcttgattttgatcatcacatgtggcttaggactccaaagccttgttcacatagctgaatgtgaggaaagaaaacttagaaactggcagaacatagcctctggctgggccccagagatttgcctcaaggctacttggaatgagactggagaatgcctcaggggtgtggcatgtagcagggcggctggagaggcgccttatggggactgacccaggtgtctgggggtcccacctcaaagcaggtgtctccacatcttggaattccagctgagggacctggccctggtttctgagccttccggagtctcacctgcaaactaggcacaatacctgtttgcaagatagcaccagggctccttgtgcccttcatgccaggctcagggtacacctattgccagggagctcccactgattccttgtgagtgtagcacagatttgttgcgactggaccatctgcacgtctgggcttcagagctgttctccccagctgttttctgccaggtcctgtcagaggcagccaccctccctgggcagagcaaaaccttgagcctgtgtttggattttgtttctgggcctaagcctaaggtacatattagtggtggggaactaaaggagggaacatgttggcatgaccagtactggcaggaggtgcagtgtgtcaggcagcatgattggggtttgcagatagaacgcagagggcaagggcaggcttgaggtttgggggtgcatggaggagaggagctgggggggctgcccaagtcaagcacagacctgcccaagacaggccatgggatgcaccctggggtggggcacttccccgctgctctggcttggattctagacaggaaggagtggagggaactagtggctgcggccatctgcccttccacattgctaggactgtttcctcttgggtgtaggaaacctcaggttcttccagggctgggaggtttggctctttggagccccaggtgtgtatgtgtggaaagccttcctggctatcagttcagcagctcacatgtttctgtaggcctcactgcatgggggagatcctggggccctcagggcagcctcccaaccccttttgctctattgcttccgtaaccctaaggtacacagctgtagggttatgtatgagtttgctggattgaaaataccatatgcagccttagggtcatgtaggagtttgcccggactgccaaaacaaagtaccacaaaccaggttgctcattgtagcagaaattcacctctcatagtctgggggccagaagtctgagaccagggtgtgggcagggccatgctccctccatacaagggtccttcccggcctcttccagctctcggtggccccaggcttctggggctcacggccgaatcactccagtctctgtctctgtcctcacgtggcctccgcccagtgtgctctcttaaaagtccacttaacatgggattcaggcccacctggataatctggcatgatctcatcttggaatcttacatctgcaaagatactttttctttctttcttttttttgagacggagtcttgctgtgttgcccaggcagaagtgcagtggcgcgatctcggctcactgcaagctctgcctcccgggttcatgccattctcctgccttagcctcctgagtagctgggaccacaggcgcccgccaccacgcctggctaatttttttgtatttttagtagagacggggtttcaccgtgttagccaggatggtctcaatctcctgacctcgtgatccgcccacctcggcctcccaaagtactgggattacaggcatggggccaccacgcctggccttctttttctttttctttcttttttttttttttgagacgagggtctcactctgtcgctcaggctgaagtacaatggagcgatctaggctcactgcaacctcccccttccaggtacaagcaattctcctgcctcagcctcctgagtagctgggattacaagtatgcaccaccacacctgactaatttttctgtatttctgtttagtagagatggggtttcactatgttggccaggctggtcttgagctcctgacctcaggtgatctgcctgcctcggcctcccaaagtgctgggattacaggcgtgagccaccgtgcccggcccaaagatcctttttccaaatagagtccccttcacaggtttcagttaaacatatccttcgagggtccagcattcaatctggaaggagccttcagagaaatttgaaagtggcataaaccaaggggtgaattaaaggcccagaagttgatgacgtcaagacgtcctttttggaagtgaggggagcagcacagctgtgagtctccaaactgggctgtgcagagattgtcccaagcacgtctgaggccagtagctgccctgtggggagaggcaagcctgtcctgtcactgtgcatcccgtccagatggacaggtagtagattcccgctggctgggtgatatccgtgtccttcatctgtcagcctctggagccgccgaggctgggtgccaggcactgccgcctgggacacatgtgacctccgtgctgcaggaccacagtgcaggtgcgctttcacagggccgctcctagggaggaggttgtggacatcagacattccatgattggattccatggctttgagaatctcacttggggccttagctcgagacccatttaaataccacatcgcagagaccagaaggcaagaccatgggactccctgcagcccccaccagaagaccctgtgaggtggctggctccatctggggcctgcaggcagccgcattctttcattctcgtggtccgtcggtgcggagcagacctgagacacctgagggggcttggcggaggttgtatttctctgtctaggggcctcaatgccatgcccgttaggcaggtggactgtggctcaagcgccccacaggaagaggcagggggctccctgccctggaaccctggatgtcagcacctgactcctacctgctgtgacattggcaaaagtagctgtggcagaggccgagggtcccacctgcttactgggccccgcttctccggacaggagcagaagctgcagagctttgggacctcagcacttgagcagcatgtggacgcgagcagcgagtaaccccgggctcccagagacgcgtgacggggtccccagggggttgcttgagggccctcaagtcaggagctgatttctatcctcaaatatttaagcatccccaagcccaggtgcggtggctcacacctataatcccagtactttaggaggccgagatggggggatcacttgagcctgggagtttgagaccaccgtgggcaacatagcaagactccagctctacaagaaaaaaaaaaaaaagctggctatgtgactcacatctgtagtcccacctacttgggaaggtgaagtgggaggatcacctgatcccaggaggtggaggatgcagtgacctgtgatggtgccactgcactccagcctgggtgacagagtgagaccctgtctcaaaaaaaaaaaaaagtaaaaaataaacatgtatggaagtacaatgtatttttaaccagaaagttgacagagaataccgatgcactaggtagaccctgtttttaaaaaaaaaaaatcccctgctctgcaaagtggcctcttcttcagagatgtggcatcactggagggttctcttggggaaatggttaaaacacctggtgttggctgggtgcagtggctcacgcctgtaatcccagcactttgggaggctgaggcaggcggatcacaagatcaggagatcgagaccagtctggctaacacggtaaaaccccgtctctactaaaattacaaaaaattagccaggcgtggtggtgggcgactgtagtctcagctgcttgggaggctgaggcaggagaatggtgtgaacccaggaggcggagcttgcagtgagccgagatcgcgccactgcactccagcacgggcgacagagcaagactctcgtctcaaaacaaaacaaaacacctggtgttttgaaaaatctttacattttttcttagaattcctaggatagaaagagtcttctttgccttcagaactgcactataagatcctggaagaataccaccctgccttttaaaagacatcatttttgccttaacatttttcaaggtgacatgcatttgcaaacagtacaaaaaagccagcgctgggccaggcacggtggctcacgcctataatcccagcactttgggaggctgaggtgggtggatcacctgaggtcaggagttcgagaccagcctggccaacatggtgaagctccatctctactaaaaatacaaaaaattagccgggcgtggtggcacactactgtaatcccagctactcaggagggtgaggaaggagattgcttaaacccaggaagtggaggttgcagtgagccaagattgcaccactgcactccagcccctgcaacagagcaagactcaggctcaaaacaaaaaaaaaagaaaaggaaaggaaaaagagccagtggtgaaaagtgtgcctccttccttcctccggtggcccgcactaacttccttagaggtgatgctgatgctgtatgttggagacgcttctgagtgtcctcggaacgttcccacgtgctctccaggccatgctgggcagctggctttcctcccgtctagctgggattctctctctctctctctctctctctctggcctctgccagtccctgggtctgagccagaatgtgtcccaatccaggaaacaggtgttgtttctggtatttcttctttttctttcatctttctccaagaaggaagaaaattggctagttttttgcttttctgactcccttagtttgggactgaggtttctgttattcttgtttggctgtcatggagaaaaacaagaacttatcggtcccgttttccattttttctttttcttttttttttttttttttttgagacggagtctcactctgtcacccaggctggagtgcagtggcgtgatcttggctcactgcagcctcctcctcctcccaggttcacgccattctcctgcctcagcctcccaggtagctgggactacaggcgcccgccaccacaccaggcaaatttttctgtatttttagtagagacagggtttcaccatgttagccaggatggtctcgatatcctgacctcgggatctgcccgcctcggccttccaaagtgctgggattacggctgagccaccgcgcccggccaatttttgtattttggtagagacggggtttcaccatgttggccaggctggtcttgaactcctgacctcaggcaatccacccacctcagcctcccaaagtgttgggattacaggcatgagccactgcacccagcctattggtcccattttctgatctatttttccctcttgcctctggctctagcccacatcggtgcatgtgtgtgtgtgtatgtgggtgtgcatgtgtgtacgtggtgtgtttgtgtacactgtgtgtgtatgtgggtgtgcatgtgtgtacatggtgtgtgtgtatgtgggtgtgcttgtgtgtacatggcatgcatgtgtgcatgtgggatgcatgtgtatggggcatgtgtgcatggcgtgtgtgcacatgtctgggcatgcatgcgtgtgtcatgggcatgcatgtgtgtgtatgcggtgtgttgctctgcaggccccagtgttggccggcccccccgtctttcctgtaagtgacttccttcctaggaggcttggtgtgactggcattccctggaaagggaggggcggatccgcagaacgggcagcttcggggacacaggggctgctgattggcattgtggcttgttggccttggtgtctgcgggtgcacacccacacagagcttttgaaatggaatcctgcgtgcccagttcacagagtgagtgacgctgaggaataagaacagagggaacttctcaaggagaaaggaagaaaggagttgtcaaagatgggctgagcaaaaaaccgtgcaatcagccgaggaggggccggcagcgcctcccttcctgcccacagagcagccgccttgtgcccatctattccccggctctgcatggggcctctgttttaaagggttctgtggccaagacaagcctgccagcccctgtccctgtccttggccactcctccggcagctttccccattcctgaagcaggtggctagcctgcttagcctcttgtcccatctccttacctgtgacagtcaccaagcctctgggaatgtggtcaccctaggacagctaaacgaggaagctgtgcagtgcacacaggtttggctgaccccaagggccagttgctgtgcatgggagcgagttccaaggggtgggagggagccagcactaggtggagctctgccagccggggcacagggaggaacagcatccaggaggagggtgcagcgggtgtgaggccctgtggagcagactctggagctagaataaggtggcatttttgctgcacgctgtgggggtggacggggcccgaggtcacaccagggagcccatattgggtcaggaatgctgctttggcaatccctggactcagcccccagctgtctggccatctgggcacttctgagccagccatgacctctgccttcccttagcactttgcagtgagcccagcacctggcagcccctgcccagctggtgcacggtccctctgcggcactgtgagcctggaagtagggagctgggtgtccatgtgctctgagcagggctgggggcccaggcgatggaccctggagctgtgaaggctgaggcaggggtgggtcagggatgaggggagactgctctggggggctcggggccatttccaccagaagttccccctgggagtttgtaggacaaaggacatggttgatgtggatcatagggctgaccagtggcaggcggtgggagggacgcggggtgcttgtgccccaggttgatcagggtgaagcagtcacatgatctctcctgtcctctttcctcattctggtttcctaaagtggtcagaggtctctgcaaaataagctaaagggagggttctgctgggtgggtggcttcggcttctgtgcagcgctcaccctgctctcccctggaacgcctggaactagggtggtcaggctggggtggaggagctcccctggaatgttccagagcttcccccactcctgccgttctgagtcaccctgcctccccggaggaggaggaggatcagctgagccgccgcgctcacgtagtgtctggctgtctgcctgtctgcctcgctgtgagcagagtgggatgctgccgataaggcgcgcacgtgggccctgggaggagcccgaggcagccactcccgcacgtgggcaggaggagggctgctcacaccaccggccgagggaggaggactgcgggctgcgcctgggcaggggatgagcttgtgtcgcgggcggcagggggaagggagtcggagagctcctgcggtccagccggatgactgatgaggttgaaagcacttccgctgcggcccccgcaggaagttcccaggaggaagttgcgaccctttctaagccatcccactggcctggactctgctgggattattttgaccccccagggcagagtgtagccatctgactggctttctctctcggcaggagacggggcgcacgcctgcaggtgggggagccccaatacgtcacacggatgagcggggcaaagcccagccccccaccccgcacccgcccgcccgcaatcctgccccctggctgcggcctccgcggctcttcccaccccggctccgctgggtgcttggcgcttgtttacggagttacaccttgcggtagaggctgagcaggagcttgtccttcagacttcccagcggagacagccaggctgtcctgtggcagcagtgggtttgtcagaggccgggggctttggccagggccggcagagagccccagtcctgaagaaccctcgttcttcgcgtgctgtcgcgggggctccgtaggcacggttgcagcagggtcttggaggccgaaagaaggacggtctgagctgagagaggggagttggccaggcacaggggtttcagagctttacaggattcagaaggtgcccggggttctgcagcccagtgaggagttcacagagtggtgggcgacccagcagccaggggcatcagccgtgggagtgggacgctccgggagtctgagctgcatcctgtgggcgcagcagacgctcaagggctgggtttagaggggtacgtctggaggtgcgggtggggaatgcacatgaggggagctaggagcagaacagtagcacgggccgagcacgatggctcacgccttgttattgcaccactttgggaggctgaggtgggaggatcgcttgagccccggagttcaagaccagcctgggcaatataggcaatatttctccacaaaaaataaaacataaaaaattaaccaggcatggtgacacatgcctgtagtcccagctactcaggaggctaaggcaggagaatcaattgagcccaggagggagaggttgcagcgagctgagattgtgccgctggactccagcctgggcaacagcatgagatcctgtctcaaaaaaagaaaaccaaaacaaaacaaaaaaaacaaaaaacaaaaaatggtagcacggcggcctaataagaccatcccgagaagggggatgaggtgatagtccacaggcctcagtggaccgtcacagcaggtatggacatcagagagtcttgctcatatctgattgattgattgattgattgattgatttggtttgatttgaatttttttgaggcagagtctctctctgtcacccaggctagttgcagtcttggctcactgcaacctccgcctcccaggttcaagtgattctcctgccttagcctcctgagtagctgggactacaggcacgagccactacacccggccaatttttgtatttttagtagagacggggttttgccatgttgtccaggctggtctcgaactcctgacctcaggtgatcctcccacctcggcctcccaaagtgctgggattacaggcgtgagccactgtgcccagccctcatatctgatttagagtatgtactgccaagctccgtggtgtgaatacttccactatagctgaacgtaaactaccaacctgagcaggaaagagctgtgcagcagcctctgtcatgtagcgttcttccctccagacacaatagacacaaatagctgagtagacaacagatagtgtaaaatgctagtaaactaggaagtggtgaggctacaatatatattatgtttacttttaatatagtttatgtagtctgggtgcagtggctcatacctgtagtcccagcactttgggaggctaagggaggagaattgattgagcttaggagttcaggactagcctggacaacatagtgagactctgtctcaacaaaaaaatataaaaattagccaggtgtggcagcacgcacctgtagtcctagctactcaggaggctgaagagggtggatcccttgatcccaggagttcaaggctgtagtgagctatgattgtgccactgcactccagcctgggtgatagagtgagaccctgtctcaaaaaataataatataatttacataattgtaagttttatgactcaattttttttttaaatagagatggaatcttgctatgttgctcagtctggtcttgaactcctgggcttaagtgatcaatcctccagcctcagcctcccaaagtgctgcgatcacaggtgtgagccactgtgcctggccatatgactcagtttttaataatgactctacgtaaaactgacctgcactattgcatctggcaatcgcgtggcccaatccatcttcaaagccagcaacagtcgttgagtccttcttttaacttccaatctctgatttttccttctgcccttcagcctgagaaaactctgcttttgaagggctcatgtcattcaattaaactctcctggataagaagatcctcatgggagagagatctcatcacactgacaggtttcacccacactcagggggttgcccgagggtgagcggggtccctgaaggtcattcttagaattctgccacggaagagccccataggccattatagggacagggtttactgtaaaacaaggtgattcacatacacagaccagtaatgctgttcctaaaggggcccaagctgatcccatcagtcagcagggctgctcacagggcacctggcctgtctttgttgaaggcgattcctgtgaaggcagtggaggagctccgggtgggaggtgagtgttgtggagagcccagcagcccgctgggctgaaccttggaccaagaaccagtctgtccttggctcccttgtgggtggggaaagatgaggtgtatcaggcagggtccagtccagaaacagaaaccagagcaacaatcgtagaggccgttgttcagccaggtattgagaaaatagagaaggcaaaaagggaacactggtgtcgtggaggagacccctgccagcattggctccacacagctgaccctgggataagagaattgttggactctttagaacctggagctgggaaggcaggtgtctgccagctggcgggtgctgggagtctgtgggggcatgcgatgaggaattctgctggtggagggaaagccacaaagtggattccgctgctgctatgggaagggacggtcactaccgctgcccctgtggggagaagagccccgggggaagaagagcactgctgacagaagcccattctcttcgcaggcttcagtttcacattcttggtacctcctggtggtgcctgggagggagccactgctgtacagagatgccaattccagaggcatggtccggcacagagcgctggcttccagctgaaggacatgtgtaacagcaggagatacctttctctggggtcccaggctcccgtcctggaccttggcaccccgccccccgtgcattgtcgtcttctgagtctggctttgtctggcacatgaagttggatgggtagactctggaagcgtccagaccagcttgcgatgctgatgaataagctgattttgatggggtgtgtgaaacggagatgccagcccaggggctcagcttgctcgtgctctcatttaaaagcagaaaatagcgacttcattctcggatacgtttgccagccccaaaggattaattatctacacacccagaagcagtggagcagaatattttggcaggattttcaggatttgtgtcatcgttgcttaatatctgtttcttcacagtcggttagaattttaaaggatttgaaatactgcaagctatctgtgtatagaggctgtggattcgggctggtacatttgcaaagtgcccattttattttttatttttatttttatgttttttgagacatattctcactccgtcacccaggctagagtgcagtggtgccatcagggctcactgcagcctccacctcctgggctcagtgatcctcccacctcagcctcccgagtagctgggactacagacatgtgccaccacgcccggctaatttctgtattttttgtagagacagggtttttgccatgttgcccaggctggtcttgaactcctggcctcaaactgtactcctacctcggcctcctaaagtgctgggattacaggcatgagccactgcacctggccgcaaaaaaagttaaagtgctaactttaactttttagattagtaagactgctaacgtgtttcattagttcagtgataataccggcttcaaagaaaagccttggcaaatacaaatcgtaagcagatagctcaactcatcatcacaaagcaaagcccacccagtgaagaaacaaatgtgggaagccccggaagcccctccccatccccacccccccccccgccccccccgccctggaaacagccgctgtcctggtgttgacagcagaggtggcactgcctggctttgaacttgaaggtgggactcaggggtggttggctgttcagatgcagcagggagagagggtttggggcattgctggtgcacgggagagggtggggatggccccccaaactagcggaggccgggcttggccctgggagatacaggaaggaggcccccactccgtggattccgtccttcctctccatctgtctggaaccctcaccctctccctccctctctgtcctcacacacccactccctgactctcactcaggcttttgaggcatgtgtgctgcccgcggagcccttggcctgacttcttccaaggggtggggtagacgcccacattttcacagcagagacagcctcccagcctctgttcagtgtgtggacagatgggtattgccttcgttttattgtttgttagtcttattgagtgctttcgctgggtgcgatttctggaatgatgcgtgaagtgcttccccatggaggtcctgtgggctgggcgatgccctcccgggctggttgctccccagagagggaagcccagctccagacacacaaggccctgcctgtgcacatgtcatgtgtgactcggggagagcctcctgctctgatgcgtcagccctccagcctgcagctgggggccccgtgccagccgggactcatttactcccctcttctgagtcagcacctgctggggttcgtgggaccccagacctggctctcttacgcctacctgttccttctctgtcttgcaggttttgggatttgagattgacgcggtgaactctgtccagttttcaaaccacacaggtaaggcgttggctccagcagctggcatagagcagactgtgggtgtgagggacggggcggagtgtgggtgtgagggacggggcggagtgtgggtgtgagggacggggctttcgtgtggacggggacctggagtcctgggcgtcgctcgggcagagcctgcacagcatatcagggtgtaggcctgggtggcctcgcctctgagaggggttgtgttgactcagcttggctgctttgaggctgtgtgacccagtgcaggtggcagaacctctcggtgcttcagtttccttctctgtaagacaggagggcaatcctaacacctgccgtgaggttgccagagttgattacgtcacttgcataaaatgcttggaccaatgcctggctcagagcgcagccgtgtgactcctgctgtccacctgcctcctggagctgaggagggtcccccatggggtggtcgtgctgggggatgtgtaggtggttctgggttttctctgttaacagcagtgctgcagggccccgtgtgtgcctctgtctccctgccctgggactctgaggactttgctggctcaggggactgagggtggccggcctcagaagcccctcacaggccatgctttccatgcccccagccccatggcctgggggtggaggtgcgtggagtcccccctcctctctgtggtttctatactgcttcgtcggcaggagaacaaagctgttctgttctttgaaaccccacctcgcttcccctgaaatttctctgaacccaggcggaaccttgggagcacagaacgtcccagaaacagcctggcagagcatcagtgcgatatgttggagcagggaggaggggcctggcccctactcttgggagtgggaaggaatgctgtggtttcttttgaggtgggcatgacacgtgctaagtgagaggaaagagttgcttggccggtgcagacggacaggctccagctcttggcggtgcagatggacaagctccagctctcgctgaaaccctttcctgcctttgcttgcggggcacactgggtgctgtgagatttggagacgtccccgaagactcaggccctccaggagcctccctgaacccacatgtccttcctggctgctctcgccatcctcctttaggatttatttttcagtgagtgagctggccggcttggacactaaagcagggtgttgagtgtgtttctggggactgtgttgggctccgtcagtgctggttcaacatccacaccgacccggctgcccttgcatggattccaggttgcgggagggccccgggctttggcaatgccttccaggcttggtggaagcttctcagtgggtggtgggctggctgacccgagggcccagagatagaaaaggggtctctggtctgccctcaggggactgggatgaggacaggaccccaggcgcttgggagcctccacagttgcagagccaggcagacagcctgggggtgtcccttcccatggggtccagcctgtggttcctgggagcccccactccagcctcctccagatgccatggggggcctgctggtttaggaccccttagccagctcagtctatggctgtgggctggctcccagccccctgtacccacactctcggggtcagctgtctgtgcggcctgatcaggaggcccccgggtagcttccctaaggctgtctctgtggctcaggggcaactccctagggcagtgagggcaggtgtcactctcccctgcaccggggcccttctgcctgctccccttccctcgcccctgccacactgtgctgctggggagtgaggctggtgcatcgtgtacctgccctgggtgccacgggagctggtggtcaagacgggggactcggcctcctccgtgcagcccctcagcccctctgggctcccgtgccacccactgtgagtgcggtgcccacgatgacactgtctgttctgcagaccttgacagagctggaggcgctttttgttttttgagtttttttgttgttgtttttcctttttgttccccctaccctctgtctaagggctagaggtgcttatttttcaccaaactcacctccaggaagcattttactggtcctgattatgcacaaagaaagatgtctgcatgcacgacgggcctcccgcattgtaggggctgttctgctccgggcacccttgttccagggctgcgctccccgggctgtctcaggggccacgttgtcatgttcctcctgctgcgtggcccatcgtgcgtgcccaggaccagctcacgccctgtgtgaccggccacgtgagcccagccacaagcagccgtgcggacactcgggccgtttccactttttggctgttggggtcatgctgccatgaacgtttgtctcagttctccagtgagcacctaggagttgaaggtggggttgcacaggctgcgcctgatttggcagggagctgggatgatgctgccagggagctcattcgcgactctgcccagggttttccttttcctttttctgtttttttttttttttttttgtgagacaaggtctccctctgtcattcaggctggagtgcagtcctgcggtcatgactcactgcagccttgacttcctgagctcaagagatcctcccacctcaccctcttaagtggctgggtctacaggtgtgcaccaccacaccgagctaattttgctatttttcatagagacggagtctcactatgttgcccaaggtggtcttgaactccttgggctcaagcgatcctgccccctcagcctcccaaagtgctgggattacaggtgtgagactccacgcccagtcttttcttttttcttttttagagacaaggtcggtctctgtcgcccaggctggcgtgaagtggcgcaaccagctcactgcagccttgacctcctgggctgaagcaatctttctgcctccacctcccgagtggctgggactatagttgtgcaccagcacgcccacctcctgcccagggttgttactggggtggtcacgtgggcagcttctgcctgggatgggccacaaagccagactcccggcagggacacgggtgttccacacaagctgcgttgttggttccctgacgcccttcaggctggggggtgggaaagccgatcccccaagtgcctgcagagcccacctggcgcaggcctcgccgcctcgaggctgctgctcgcacttctgccccttcccccggccaggcccccgttccttgaggccgtaccacaaggtgcgttcatttttccacaccgtgagctgggcttggcagagcctccaccttgtggccagtattcccagtggcccctttgagaggatttcctggagctccctgtctgagcttcccggactgagggcactgggaaggagcctgcggagctggaggtcagcgggtggacgggttgcgctgtcctggctttcggagtgtagagccagaggggatgggacaggtgccctgctgctgggcttggtggtccctgctgcagggaaggggcagctggtgtgaacacaaggagctgcggggctggagaaggccagggccaggagcctgccgacggacaccagcgaggggccaggccgggccaggagcctgccgacggacaccagcgaggggccaggccgggccagactccctggccggctgggatctgacaggagtgccaggctccttgggccgcccgaggaaccgcttgtttgcctgtgctttttcatctgtaaatggaatgagttggacacaagatccaagcgccctcccctgttggagaaggttcttgtgggctctgggcccatcccacatcccacagtgggcaggaggccaccaagaggtgcaagaccatgccctctgtttcgataggaagctgggcctcagaggggcctggggcctgtgtctgagacccggccaagtgctggacgtctccccttcctcatggctgttatggctgaattacgtccccccaaattctcatgttgcagccttaaccccagcacctcagtgtgggactgggtttggagatggagcccctacagaggtcagcaggttaaaagaggccatcagggctctgggtgggccctgatccaagctgcttggtgtccttgtaagaagaagagatgaggacacagacacacacagagggacagccccatgaggaaacagggaggcaatgccgtctgcaagcccagggcagaggcctcaggaaccagccctggtgacacctggaccttggacccccgtgcccaggacagtaggagaattggagccgcctggctgcagtccttcccgatggcaccctgtattagtccgttctcacactgctaattgttgggaaaagggcttgtggaatgcctgtataaactggccatgaaaatatgggacaataagttgtggaaagccacaagaggcctctgaggaggaaagcctcctaattgccatcatgttcgcatgctcagggcgagacctgctgtcttatctgtaaacaccgtgttcaaggagaaagacattccttcgaagcactggactgtggacagacacacgagctcctggttaagcccgctcccaccagctcctgtccgataagttaaagatacgctgtttgagcacaaaggagattcattgaaaccgctattgctgtagattacgcctgtgacgcactgcctccctttcactgtttcgccctgaatatctgcttctcagatctaagtgactgtactcaataaatagcgtggagaccagagctcagtgccttttgcagcctccattttgccactggccccctggctcctacctttatgaactcttttctttttctttttttttttttttggagacggagtctcactctgttgcccaggctggagtgcagtggcgcgatctccactcactgcaagctccaccccctgggttcatgccattctcctgccttagcctcccaagtagctgggactacaggcacccgcaaccacgcccggctaatttttttgtatttttagtagggacggggtttcacagtgttcaccaggttggtctcgatctcctgacctcacacaccacgcccagctaatttttgtattttttagtagagatgaggttttgccacgttggccaggctggtctcgaactcccgacctcaggtgatctgcctgcctgagcctcccaaactgctgggattacaggcgtgagccaccgcacccggccccacctttatgaactcttaacctgtctcttctcattcctttgtcactaccggacgttggatacaccatgggtggtgttgaggctggtccccaacactaataaagacatacctgagactgggtcatttgtaaaggaaaaaggtttaatggactcacagttcagcagagctggggaggcctcaggaaacttacagttatggcagaaggggaaacaaacacctccttcacattggcggcaggaaggagaagtgcagactgaggggcccagggttttaaaagccccttgaaaccatcagcttttgtgagaactcagtcactatcatgagaacaagatgggggaaccacccccatgattgaatgacctcctgccaggtccctcccacaacatgtagggattatgggaactgcaattcaagatgagatttgggtggggacacagccaggccatgtcacctccccaggaaaggagcacatgtgcagcagtggtgagtcccaccctgcctggaaagatatcaaaatccgagggcagaaaggaccaggagggaccattgctcacctccctcctcctaccccttaccccaaaccccgccccagcctggcagaagcctcctcaggacacaccctccaccggaggggcaggctgctgtgtgaggcactgacctcgcccgcagtggataccacctgcccctcctgaccccagtgactgttaacccagagtccatcaggggcttggtctctggcagacccacccctcagtgcgtacactctggtgtcccgggcagagtacagggcaggcgcccccaggtgcaccccccagatgccgcactgtgcctggagcgtggctcctgatggcagtctcaggacctttgcgccacacgtcctcccgtgcgacggctgctggggaaagccaaaggcgtcccttccagcgggagccagcgactggtacgcaggagggccctcaggggcaggagccatggagccctcctctggtgtgggaattcaggggatcttagccacagggcatggcgcgtgggcgcagagccggccgtgacccacaagtgcgtgatacttgtactttgctattctaggaacccatacatcagttttccttatttgctgaaaaaggcatgcattagaggggtgattcatgtgggaggaggccgggagcccctcgatgtgaggcgtttctcatgggcgaatgtggggtatccatggtggacccccaccctgtgtggatggctgccccctgagcagtgctttgagctggagctgtggtcaggttccgcagtgcaggaagggctcccaggaggctggtggtcccgcctgcaggaagccgacgcgtctgtcctcacacattgatatgcctgtctgcctgggacggacacttcaccctggctacccatcgggccaagggcaggttgtatacacctgggctgaggcctctttctcattcacatctatctcttgctcaggagttgatctaagacaggctctaattgcaccttaataagcttgttggggaggagttgggggtggggacataacaagccctacctgccagggtatccgggtgacagtggccggtggccgagcaccccggcctgaatagctggggactaatgcaggagacgctgggaaacaagagactgtgacgttgtgcggagggagtagccaggggccttccggacagcaatgggggagcaacgcagccgtgagctggtgtgtctctccccacgctcctcctgtacctgggacgcagctcccgcaggaactggcagtgggagtgtgggggccacggaggtcgtagtaaccatccctgacagtgcaggggcggggggctcgcgggggggctcgcggggggctcgcgggggggctcgcgggggggctcgcggggggctcgcggggggctcgcgggggggctcgcggggggctcgcggggggctcgcgggggggctcgcgggggggctcgcgggggggctcgcggggggctcgcgggggggctcgcggggggctcgcgggggggctcgcgggggggctcgcggggggctggcggggggctggcggggggctcgcgggggggctcgcgggggggctcgcgggggggctcgcggggggctcgcgggggggctcgcggggggctcgcggggggctcgaggcgtcccatgtgggcagccgttgggacctgccaagcactgcgcctagtgatctccttcgggtttgagccagtccatggggaggagccgtccaccaggcagcctcagggagagtgggcgggtgtcaagggaagcccacggccccagctggcccccttgtgtctgagcccccatggcttcctctgcctctaggctatgcccactggaagggccaagtgctgaattcagatgagctccaggagttgtacgaaggcctgaggctgaacaacatgaataaatatgactacgtgctcacaggtaggtgccggagcaagctgccgcaggggactacgcaccccactccagccagggtgggctcagggaggtccagagcacccccgccctgggcctgtctcgggtccctgccccttcaaggagggccttggcgtgcccaagccaccatcacacccccggtagcctggggggtcctggccacactatgcctgccgggacaatgactgcccaggctgtgccaagtcacccccactcctgtgaccacactggggttccagtgcccaggggagggtgcaggcagggtgttgggaacgctgaccggggcaggacaggtgggtgggacactcaattaggtgacgggctgctacctggtacactgccatcctttgtcaactttctggttaaaaaaaaattgtatttgtatacatgtttattattattattatttttgagacagggtctcactctgtggcccaggctgtagtgcaatggcacaatcatagctcactgcagcctcaacctcccaggctcaggtgatcctcctgcctcaacatcccaagtagctgggagtaaaggcgtgcaccaccatgcccagctaactttttgtgggtgtgtgtggagacagggttttgccatgttgcccaggctggtcttgaactcctaggctcaagccagccacccaccctagcctcccaaagtgctgggattacaggcgtgagccactgcagccagcctggtttctacacttttaaatggttaggggaaacacttagcctcccaaagtgttagaattacaggcgtgagccactgcgcccagcctctctacatgtctaaaggtcacatataaggccaggcacaggggctcgaacctgtaatcccagcactttgggaagactaggagggaggctcgcttgagaccaggagttcaaaaccagcctgagcggcatagtgagaccttgtctctacaaaaaaatttttaaaaattaattagctgggcacagtcccagctactcgggaagctcaggtgggaggatggcttgagcctgggagttcaaggctgcagtgagctatggttgaaccactgcactctggactaggggacagaatgagaccctgtctcaaaataaataagattaaagtgtcatatgcttattactgaaagtagaaatataaataaaggaaagatcactccttcacctctcgcccgtgggttcattcctgtgaagcacagcgtttctgttgagaaatgctgccgggtctgccctccgtgtctttcaactgtgaggacacctcgtttgcacccacctccctccccccagctcctgagcactgtggggacacctcacctgcacccacctccctccccccgctctgagcactatggggacacctcgcctgcacccacctccctccccccagctcctgagcactatggggacacctcgcctgcatccacctccctccccccgcccccagcactgtggggacacctcgcctgcacccacctccctccccccagctcccgagcactgtggggacacctcgcctgcacccacctccttccccccagctcccgagcactgtggggacacctcgcctgcacccacctccttccccccagctcccgagcactgtggggacaccccgcctgcacccacctccctctcccccgcccccagcactgtggggacacctcgcctgcacccacctccctccccccagcccccgagcactgtggggacacctcacttgcacccacctccctccccccagcccctgagcactgtggggacacctcgcctgcacccacctccctcccccctgcccctgagcactgtggggacacctcgcctgcacccacctccctccccagccacccctctgcagggtctgctggtgcttctctttctttgtgccacagttgatcgtggtgagtctcctgttttctgagggtgacctggattctccccctaaaggttatacgagggacaagtcgttcctggccatggtggtggacattgtgcaggagctgaagcagcagaaccccaggctggtgtacggtaggcaggggcccaccctcgggtctggctgtgtggccccacacgggtggggctggcctgggagcccgggaagggacgtcttagcctccttcctcctctgcacgcctccgtgccccgcctctccgggccagtgaattgtgtctgctgggcctctgaagatgttggcctgctgaagtccgctgggctagaagcgtttgcaggtgaccctggtgtcttgtgtggctggtgtgagacaggaaggggtgtcagtgtgctcgtatagtggggctgctgtgtgaatgcctggggcccaggcagcactgttgtgtgactacactcaccctaaaggcggaaggggcaaggggccacacccaggcagggccaggctagggagtgggggagggcagggtcatacccaggcagggccaggctagggagtggggggagggagggtcacacccaggctgggcccgctagggagtggccaagtctttggggcatctgccttgatcggtctttcgttagaggccaggcagtgctggatccatcttgacgcctggcagaaggggcagcgtcaccaaaccttgcagacaggctctctctggggcacaggtctcccgggtggcaggaggacaggcctggcctagcacatggtttgccacgctgtgtactgttgcccaaaaggagagtgcttgtcggtacagacgtgtgaggcccggattgtgtgtgctcgaggccaggaagaggaagggagctgctgcacctgcttgggtgacaaacagtgatgaatagcacctcacagcaattaggatgactgtcatcaaagacacagaaaatagcaagtgtgagcgaggatgcagaaaccctcatgcacagctgctgggagtatgaaagggtgcaaccactgtggaaaacacgttggtagttccccaacaagtggaacaccatcaccatgtgacccagcaattccgccctgcgcatgtatccgaaatagctgaacacagactcaagcggatgtgcgtattcccacgtctatagcagcgttgttcccagtgaccaaatgtggaaacaggctgtgtctgttgatgggtgatagacaaacaaagtgtccgtacatacaatggagtattactcagtctggaaaaggaaggaaattctgacacactctgcaatgtggatggcgcttgaggacatgatgcttagtgaaagtagccagacaccaaaaagggagactgttacacgatcccgctatctgaaatagctaggaaaggccagttcatcgaggtagaaagcagacgaaggctcgtcgcggctgggaaaggccagttcatcgcggtagaaagcagacggaggctcggtgtggtggctcacgcctggaatcccagcactttggatggctgaggtgggcggatcacctgaagtcaggtgttcgagatcagcctggccaacatggtgaaaccccatctctaataaaaatacaaaaattagccaggcctggtggcgcacacctctaatctcagctactttggaggctgaggcaggagaatcacttgaacccgggaggcggaggttgcagtgagccaagattgcgccactgcactccagcttgggtgacagggcgagactccatctcaaaaaaaaaaaaaaaaagaaagcagactagacgttaccagggcctaaggcagggggagtggggcgtgagtgtatagtgaggacagagtttcagtttgggaagatgagaagttttggaggtggatggtggtcgtggttatacacggtgagaatgtcctgaatgctcctgaattgtacgcttaaacatgcttacactggcaaagattatggtatatattttttactatattaaaaagttaaaaaagggaagatacctacttcaacttggcagcttaaaaaacaagaaaaaagaaaaaagccaaatgtggttgctcacacctgtgatctgagcactttgggaggccaaggtgagaggatcgcttaagcctaggagttcaaaaccagcctcggcaacatggtgagaacccatctgtacaaatcatttaaaagctagctgggtgtgctgctgcatgcctgtggtctcagccacttgggagggtgaggcaggaggatcgcccgagcctggaagatcgaggttgcagtgaaccatgattgcaccactgcactccagcctggacaacagagcaagaccctgtcttaaaaaaagaagaaagaaatgtggagggtttcttactcgtcagctgtagcctttgctgataagatgcccttgtgtctctgcagtgtgtgatccagtcttgggtgacaagtgggacggcgaaggctcgatggtgagtagtttcacgtgtgtgatttaaaagtgtggtgagtggagctattcctgtccagccagaagacaggcccacatctctaagtgtctaactcggtgggactcctctgtccaggggtaaaaagacaaaccttgttaggaaggagaaagggaaccgacatattttctgtaaagtgcctgacggtagataaatatcgacacctttgccggccgcacagccttgccacagctgttctcattagagcacagaagcagccacagataagaggtgtacaaacatgatgacttcttttcttttctttcttttcttattgagacagagtctcactcagtcacccaggctggagtgcagtgtcatgatctcagcttactgcaacctctgcctcctgggctcaggcaattcttaatgcctcagtctcccaagtagctggaattacaggtgcacaacaccactcccagctaatttgtatatttttactagatacgatttcactgtgtcgtccaggctggtctcgaactcctagcctcaagtgatccacctgccttggcctcccaaagtgctaggattacaggcatgagccaccacgcccagccatggatgactattttctaataaaatttcatttgtggacactgaaatttgaattttctataattttcatgtgtcacaaagtgtcattctttttttggcttttttcccctaaccatttaaaaatgtagaaaccagactgggtgcagtggctcacgcctgtaatcccagcactttcgggggccagagcgggtggctggcttgagcccaggagttcaagaccagcctgggcaacatggcaaaaccccgccatctctaatcaaaatacaagacaatgagctgggtgtggtggcacctacctatagtcccaactacttgggaggctgaggtgggaggatcacttgagcccaggaggtggaggctgcagtgagctgagatcgcaccgctacactcactccacagagcaagaccccatctcaaaaaacaaaagaaaaatctagaaaccacttaacccatgagctgtgtagtaacagcagcagctgcagcccacagacctggacgtcggatcaagtggatggagaacaaatccactgtgaccagtccagaagcctagaatttagaggcggaaggaacccaaaggtgatcctgcctgtgggtttttaactcagccattcagcgcccaggcgatttcagtatctgccttctttgtcgttgtgtctagggtgtctgtttgcttgctgtatattcactgagcacagcgggcttctccactggcacagggcacgcctgggcctgtgccctccctgccccgctgggtcagtggttgaagtcaggatatctgtcactgggcatctaactgggtggggcgggctggtgtgctcagcgtctgtctgtccactttctcccatgcttgttctctggaaggttccctgtcctgcgcccagcctgcaggaccccagcttgcagctccctgccttcccttcatggtgctccctggtgtgggctctgctgaccctcggcagacacttgcgtttggatcacgaagagttggggccactgtccagttcagtgcggctacgggatctggcccctcgattttgatcacatttgttttcctgaacaagagtggcctaaacacgagctcctgtctcagatgagcggtcaccccgtatctcccctttccgtgaggttaaaggggtgtgttggccctccctacccaaaatggggctctaaagagctttccttcgatttcctggtccagggatcggggacatccacgtgccacccacccatccttagtgcctcctaagccatgtctggagcagcggccggcgtgtgaccactttgtgtgctctgagcaccaggtgcagacatgcctcctgtggggcctctgatctccaagggaggtttccgggagcaaagtgaagtgaagggattggaaactcaggccactcagccagcaggggctgctgaaatgttccatgaagcccacagaattcttccagagcttcgcactgcctccggcttaaatttgatcgctaaagaaaaccatgtgttgcctggcacagtggctcacgcctgtaattccagcactttgggaggctgaggcgggtggaccacctgaggtcaggagttcgagaccagcctggccaacatggcgaaaccccgtctctactaaaaaaaattagccgggcgtgggggcaggcgcctgtaatcctagctgctcgggaggctggggcaggagaatcgcttgaacccaggaggtggaggtcgcagtgagccaagaccacgccattgcactccaacctgggcaacaggagcgaaactgtctcaaaaaacaaaacaaaacaaaaaagtgttgaattgtttgtcaggcaacttagacaaaaactagatgaagggtgcattgactcagccaggaagagctggcgggttgggctcccagtcgcagatggacatggccagcacccccaagccctcaccagatgaccagggctgctccatccacctgtggggtttccctttcctcgtctccctcctccctccctccctctctccttcacctccttctcctcccagacactctgtggggacccactgtgcgccctgagtcctccctcggcccctcggagcacttagggttccccactctagtgtgcctcggccacacgctgtccccgtggtgggaacaacttatcgctacagtcggggggcctggcccctgagcctggacttcagggggcttttgggggagcactccgtggtgggcttccctccgcgccccctggcgtgcttccctcacggtgactcagcctctcctcctgtctcctttgttggccagtacgtcccggaggacctccttcccgtctacaaagaaaaagtggtgccgcttgcagacattatcacgcccaaccagtttgaggccgagtaagtcattttattttattttactttatttatttatttttcaagatgggtctcgctcttgtcacccaggctggagtgcagtggcacgatcacagctcactgcaacctctgtctccggggttcaagcaattctcctgcctcagcctcccgagtagctgggatgacaggcgtgagccaccacgcccggctaatttttgtatttttagtagtgacggggtttcaccatgttggccaggctggtcttgaactcctgacctcaggtgatccacccatctcagtcttccaaagtgctgggattacaggcatgagtcatcgtgcccagcagagtaagttattttaaatggcaaatgctaccagtctttccccagggagagctgcagagaacatgccagaagggtctccactctgccttcgggctgcctgtttagcttacgaagtggttctcaggaaggtcctgccatggggcgagtgccccttgatactggagcaggatgtggtgggggcgcctgggttggagaagcccctgcccacctgggtcccaggctcacgtcttctctttggtggtggcagccatgggtgatggggatggttttgctgcccctgtgccttcctgagcggcagggcccctgggagaggaagaggaggggcgacctggggagctgtgggcttgtcggggccaccacagcagagggagggtgggggcagcacaggcggccaggtcacctgccgccctgtgaggggaagaggagtgtgttgggcttggctgtctgataccgagtttgaaaaggtctttctttgggtgcatggctccccccagctgaagaatcacacaccaggggaagccaccagcgccccagtgccatgaagagtggagctgcccgcggagggggctggtgcctgtcacagcttagctctacctggccctgagccaggtcttgagcccccccattcacgcaggggtgggggcgcctggactcttggaggcctgggatccctgacctgggcctgtccaaacttgggggtggcatctcactcgaggcccctgagccatgggtggcccatgcgtgcattaatcgctagcggctctttgactttgtatggatgtcagtcacccatgctgagaccctgcgctgtggcatgggccttaagtgggggccgtggctgctgtccatcaccacggttacgtataaacagcagccatgattgggccttacgtgactcctgtaatgtgagggtcccctttagaaccaaaccccacatgttgcaggggccccggcccagggtggccagtggacgaagagttagctgcctgtggggatggggatttccagagccgctgcggtttggggaatgtcaacacacaacccggagaggagaggctcacctgtccccacccgcctgtccccgcctgtcttccaggttactgagtggccggaagatccacagccaggaggaagccttgcgggtaaggaggccctctggggcctgtgcggggcacatgtgccgctcacggtggggacgggagacaggctgcctgagtggcaccactgtgtcatttctccccagcagtgactgaacagtctgtaccagtcggggcctccagagatcagcaggatatatgtgtgtgtgtacatgtgtggacatgtttgtgcatgtgtgtgtgtgtgtgcatgtgtgcgtgtgtgcgcgcgtattgtgtgtgggtgtgtgtgtggatgtgtgcgtgtgtgcgcgcacccatgtgtgcatgtgtgcacgtgtgtgtgtgcacatgtgcatgtgcgtctgtgtgcatgtgtgtccatgggcgtgtgggcatgggtgtgcacgcatgtgtgcatgtgtgtgcgtatgtgtgcacgtgtttgcacatgtgtgtgcatgtgtgtgtgtgtgtgtgcacatgtgtgtgaagagctattgtaaggcggtggcttgagctgtgtgggggctcctgggcatgtttgggatttgcagggccagctgttgggaagggcaggctggaggctggacacaggagcagatgcagcagcccaaggtgcagtttcttcaaagtcctttttctccgggacttggagaccgtgcgtgtcttgctagcattgaaccttggttgagtcatcttagtctgttggggctgctgtgacaaaatgcctgagactggatgatttataaaaaacagaacttttggccggatgcagtggctcacgcctgtaatcccagcactttgggagactgaggtggtcagatcacttgaggtcaggagttcgagaccagcctggccaacatggtaaaaccccatctctactaaaaatacaaaaattagctgggcatggtggtgcacgcctataatcccggctagttgggaggctgaggcaggagaatcgcttgaagccaggaggcggaggttgcagtgagctgagattgcaccactgcactccagcctgggcaacagagtgagcgagactccatctcaaaaaacaaaacaaaacaaaacaaaacagaactttgttccccacagttctggaggctgggaagtccaaggtcaaggcactggcaggctcagggtctggcgggggctactttgctacccggactgcaccttgttgctgcatcctcatgtgtggatggcagggggctcgaggggcccatgctgctccctccagccctcatcaggcacagagaaaggggagccctcatgacttaatcatgccccagaggaccccttctgaatattgccacatgggtgccatgtttcaacatgcattttagagcagacactgtcagactgcagcaggagtccatgtgctttgggctgcgttcccaagcagcctggcgctgccctgaattttgtcttcacaacccaggagcctggtcctgagaatgggccactgcagcagccactcctcccactcggaggcctttcgctgacctggtattgggtcctgggactgcagagtcagctgaccctggagcagggtccagattctgctatggacacgtgctgggtggcgatgcagcacatgtgtgtgtgtgtgtgtgtgtgtgtgcgcgcgcgtgctgcccgatctgaggcaaccgtgcggtggagacagtttctacgagagttacagaaaagccaacgtacagaggggccagctcctcctcgctgcaggacaggcacccatctgtccaccccccaagggggaggccctcgccagtcacctgtggggagccacacggtttgggctgacagtttgtggggggatggtggctgaccaggtggctgtcttccctccgggagtgccgccattgggaacgggctctgggggagtggggtgtgaccggccgtggctgatgctccccgtgccactgccaggtgatggatcggggagtggggtgtgaccagccgtggctgacatgtgaccggccgtggctgacgctccctgtgccactgctaggtgatggacatgctgcactctatgggccccgacaccgtggtcatcaccagctccgacctgccctccccgcagggcagcaactacctgattgtgctggggagtcagaggaggagtaagtgcccccatcgtgcaccgtggccgcctctgctcttcccagaggaaggtgttctttggggctgcaagaatgttttgggttcaatagcatgaaatttaagccttatccagcaccgggatgacacccccattttacagactctcagggatcaggtgggattcccaagacctcacaggtcacgatgaatggcctggctggaactggcttccacggacccagcatcataggcctccctcagagccaggcggggtccctgagttcactgggaggacgcgtccacccggctgtgctgattgtttacacagacaccacctggttgattttctctgaacagtgtgaaaatgacgcagaaggctggggccatgcactaagctagtggccgcgggttcatacccatgggcccaaaagaacagctgtgacctccttgccgctctatgtttggacatgggagccttgcaggcacacacataggcacaaatgcacatacacttgggcacaaatgcacatacgggcacacacgtggacatgggcacacataggcatacatgcacacatacacacgggcacacacaggcatacatgcacacggacacatgcatacacacggacacacatgcatacacgtgggcacacgcacacacatgcacacacactcggatgcgtccaggtacatcctagttcttcacgccgtcgttactctcgggagtttcacagcgacccccgaggcggcctgaccgtgtggccctctgagggtgcagtctttccctttcccttgctgcggtgatggggaccccatgcatgccctgagcccccacgtcctgagcaaggccaccttgtgctctgcccctgtgaccctccctgccgccgtgcccaggaggatcagggatgggaggctggccctggcagaggagcggcagatctcagtgaccttgcccatcttctccccctagggaatcccgctggctccgtggtgatggaacgcatccggatggacattcgcaaagtggacgccgtctttgtgggcactggggacctgtttgctgccatgctcctggcgtggacacacaagcaccccaataacctcaaggtcagccacacgcaccgctcccctcctcgcccactcccacggcacctcatggggagcaggatatgagagtcctggtggggggtccctgctgagctgacagggcatggccctgagtgctggccccagttgtgggggagggcagtggccaggccatgacaggagttgcgcctgtcactctcacatcgcctcccatctccccttatttgggacctagggatgatcagagtctgtgagggcttgggtgacagatgtttcagaacagacccatgggggtcccaccaggattcagatgccacccgcttggcgttggcgcagggctgtgggatgcatggagctgttgtgtccttggtgacttgggggctgctgcagaggagtggcaccctgcagcatttcccacagtgtgaccacggcagtgacctgagggacggaaaggccggagccgcccttcggggacagtaggtgggaggctgaggacaggggtccaggcaggtgtggagagccgtctttctgggcgttttgtctggatgtctgcctgcttttcaagtttgtagagatcgggtggctttgcttagacagtggggggagtgggactgttgggcaactgacatggcaggttgggatgtggggtctcgtgagcctttctcgtgtgtcccatgggtaagcacacagctcagcggggacagaggagttttgttgcaactgtggcgctcagatccgtgacctcccgtgctgcatgcagcagagttgcttgtggcctcggcaggtggttttgtcagctgagtccgaggacgcctggagtgtgtcttcttacaacaccgtccagagccgtgctgtgctctgaggtggtccccagcccctgggctcagcccccaaaactcccctgggtacttcccactgcgtccgcagtgggttcaggtgggagggaggggcctgccatccctttggaatgtggggcagggcaggggtgccatgggagtgacaggaggaagacaggacacctctgtcactattgggtgcgctggggaaggaagagttcagaggtcaggacctgcaggtggctctccctgtgctgtctttgccgggccgcttaaggggccacgtgtcccccggggtacacctcctccccaacaagtcagtttcagctgagtgtcctggtgtgtaaaatggaagaggtggactgaggccctttgcctcccatgggactagccctctgcacaccctgagctggaatgcacagccccctcattccatcccttctggcccctcaagggcaattaaacagggccattaagtaagcctgccgtgtttaattggtggtgcagggcagtggaaaagtgccagctggcaccccgaggaggcctcactgccaggccgcccaaggtcacattctgggtttggccagcccagggttgtggagtcggggagcgagttccccgtgcttccccagcacctttgactctgaggcatcactgagtgatgattggctgactctgaggcatcactgagtgatgattggctgactctgaggcatcactgagtgatgattggctgactctgaggcatcactgagtgatgattggctgactctgaggcatcactgagtgatgattggctgggctttcggcaggagcacttccccttgtagactcgttataaggagttaattctgggaactcctaccaagctcctgctgcctgccaagttctatgcaggtcacgaggctgtcccttctgtgagccatctcttgtccagagcaggtagctgggaccgggcatctgctcagccctccgggctctccgtggtgggcagtccgcagcctgtcctccagggttcagcacgtgcattggcggagccggctccccggtggctcggagagcaggacggcccttgtgttccctggaaatcccctcctggcagcagtgggcacgtcgggtgttgtgagtgggccaggggcacagcaagtctgtcctccctgcaggtggcctgtgagaagaccgtgtctaccttgcaccacgttctgcagaggaccatccagtgtgcaaaaggtacggcggccgggctgcatgggctgcgtgggctcctggctcccgaagtgggtgggagagaagagctggcacgtgctggttttgaaggtgtgatcggtgtctcctgctgacctcacctctgggagtgggggcaacagcgggagcccctctgagatgggaactcagtgctctctgcctgccccgcagcccaggccggggaaggagtgaggcccagccccatgcagctggagctgcggatggtgcagagcaaaagggacatcgaggacccagagatcgtcgtccaggccacggtgctgtgagggccccgccgcttgcccgtgacacgcagcgcgttggtgtctccgtgtttgtccctgtgaaaacatgtaacgtctgccttagagccatgaccgaaacttgatatttttttctttcatgagtgtccggcatctgctggtcttcattgtgaaacgtgccagtcgtgctttgtgaaaaataacaaagtggtcacagaaatttgtgatctgaaaacccggctcccttccccacaaggctcctgggcctccgggaagacgggcccctgtttgccatctcgggggtgttccctgtgggagggtgagtgggtgaggccgagcctgctgcgtgtggagcctcgagtgggccctggctgccactaccgtacagaggccgtgtcgcgctgggctgggcctgggtggcctctgtctttgcatctctgagaaggagtcgggtggtaacggttggggtcaggaagaattctgccaagtatctttactgtcattctgaccatagcctctttgttcccgcattcgaacttttggttcttactttgctgctcgtttagtccctggggatttcagatcttaggctgttgtttcaccgtatgggagggttgatgtgagcttgcttggagacacacggtgcagcatcagggaccttcccaggccccagcaaattcaagtcggtctgcagacctctcagctacccgcgggacctcttgtaacccatcggcatcttccaggaatccgccgagtgacttgaggaagatgctaacgcagtaaggtctgtgctgggccaagagcagctttgaagctccagagaaccaccccgtcaggttccttgtggaagctcccctcatccgtggtgcagcaggctgagcactgcgcgtttgccacgtgctgcccgtgacagcacattgagccacagcatttgtagacaggacagaggggtgcctgccccctgcccctgctggcacatttaacccttgtcccctgacctcagttctgtgccccaccaaatgcccaggggcaagaggccaccctggaagctgccaatcttccaaggtgggtgtggggcacggtgggggcgggcagctcccaggcccttgggcaggctggggtgacggcagaggccacagcaccagctctgacaagtcctatcatcctctgctcagcagtgacctccctggccccactttgcccagagtttggggtccccccaggtatagctataggcggcagtgcctgtccctggcctgccttgatttcagccacacccctgcagccctgcatcccagctctggggtgtgcagaggtttgtgtctccagggaacccacggctggagagaaatagggagatgcaggaagtgggggcccatggggcccccaagaagcggactctccaaggggtacccccaccccgctaccttccccacggacgggcccctcctggagcccataccctcctgtgaggccattccagtgtcttctagaaagactcgcttgccaggagtgcgttctttgttgaaaaatgccctgaagcgaaaagatgcaggtttatatggaacccccaccccctcccccactctcccactctgttcgttctgaatgtcttcacgagcgtgcatcagggcgcctggctcccccacctcagccagtgagtcagacacgggtttcgcagccatgtttcctggctccgaggacacgggtggcaggcccgttgcagcccagagccactggtccctacagggcgccgccacaccagcaggaaggaggatggctgtgtccggagcctggcggggaggcggcctccccagtatgtgagtgcagggatctgccagaaccacctggccctctgtagggcgtttaactggaaataccctcactgccaagtggagactggggcgtgtgccacattgccagccaccaggaaagcttttctttttcttttttttttttttttaaacaccaagagcacgtatagcatgggggaaagaacctaaatgtctctctgtcctgtgagctggtgaaaaacccagcatgagaacgcagtgtcaggtgtgggactccttctgcccctgcagtgggtgttacgggcggtgtgccctggcgagcaagctttgattcttggttctttgagctcgtttcagaggctgagtccccacatcagctttagttcttggacttccctgtattaagcaagaattaggagaatggctgtccctgcaggcgcctcccgtaaatcctgagctctctggcgcaatctgaaacttctcttctgttttctttggctgtatcagccgaaccaggagaggcctgggctgcgactaaggagaaagaaatcgggggtttctgagagcagatggtgcctttgtgggtgcagggcttttgtggaaattgtcagcctctacgggcagagtccggcatcccctccccagactgcctgctgtcaaaccacggagcagctggagcctgccctgtccacggcccgtttccacccgggcatgttcgtctctcctgacttcggcagaggcccctggtggccttcagtttcagtttctcatccaggaaggtaaccttgggcattggcagtgggtttccctatggcttggatccagattagaattgatctttgttttcactttccatagttaataacatgcaaaataatgagaagaatttattttaaggtgacagctatactggtccaacatcgcctgcttattgtcagggtacagaagtttaatactttcttaatccagtttttcaaacttctccctgtagaccgtaaggatgaattccacaataggatcctttttaaaatcgattttaaattgttgcctagtcctgccaaggttattatgtgcatctgttatttttccaatacatgtaaacagttgcagcatgatgctttgtttaatgtcctgttcttaagctcgttagagccagttttgaaacgtttggtcttaccgtgaacggaggctggcttggcttagccacgctgatgagtaagtgagggatgtctccatcttgagatcaccaggcaagagagttgcctgcaccaggtaagaggccaaagcccctggggtaacagtccccaccgctacccgaggtaaaacaataaaagctatgtggttgagctcaggcctctcgtgcctggtgtcagagaaggcagagcccacagtaggtgcacggtgcaaggccctgggagggcactggccagggaaggtggtatagatggccctcagattgcggggccccgagcagctccccactctgcccgtccaccttccctggctccagcctcattctctctttagtttaactatgcaaagagaggaggttgagagtgttctggcagctggagctcttttccttgtccttcctgccctccgatggggccacctgtgtcggggcagcagtgtccatgtttatggagatcagaggtgtccccactgtgtggctggactgtactctgctgcccgggtagccaggagtctctccctctctcccctgccgcctgcctggtctcatgggcctccttcacacacccctccctgtggatcgcctgcctgggcccagagcaggggaactggagtttgtgagtgagcagagcaggttatgtgcagacagggaaacgagaactttggacctggctttctgagtccaggtgagagctgtgtggccccccgatgccactctgcccgccggagggatgtgcctgctgagccttttccttccacgccgcctctcactgccaggccagcggcttccgctgagactcgctggagaggcggctcccgtgtccgtccaccgagcactcagatggatgctgatcaccagggccgagggggctcccagaaggaccccaggccctggggagggtggctgtgggaggccaagtccactgcccggaagtcttgtcagccctaagccagggaagcctggagcgtggcctggcgggtctgggtggacaccgtccccactccggactcccagcacaggggaggatacctgagcctgtatggccctgtagccctgggcagagctgggcctgtcgtgtgttcctgcctggcaggtgcaggtgctggccatctgcaggtggaaggaggtgggaatcttggattttttgtttttttttgtttttttttttttgaggtgaagtctcgctctgacacccaggctggcgtgcagtggtgtgatctcggctcactgcaaactccgcttcctgggttcaagtggttctcctgccccagcctcccaagtagctgggattacaggcatgcgccaccacgctcagctgatttttgtatttttagtagagatggggtttcaccatgttggccaagctggtctcaaactcctgacctcaagtgatctgcccgcctcggcctcccagagtgctgggattacaggcatgagccagtgcacccggcggaatcttggaatttttatagacagcacctcagtttctgactccagccgcacacctcctgcctctgccagcaggggttgccgccagaccagagccagggccaggtccctgcgtccatcccccccggtaggatggacgtgagccatccttctaggggacttttttcagtgtgcgactcgtctctgttaggtggtaggagccagtttgtgtggcctgtgccacgctccacagtgcgtggctgggctctgtgtgtggcctgtgtcccctgtccctgcaggacccagcaggcatcgtggcgtgacagctgtgtccaagccactgcccgggcatcccatcacccaccagggtgcacggtctctcctgctgggggctttctgtcgcatgtgtgtctcctgtcgactctgcagtttgttctcagagcagaatgtttcctgttctcagtgcacaaagacactggttttcaatcggcgtctaaaaccacgttcctgcctttcattgcaacacggtgtgttcatttgtttaaaacagtttaatgagtaagtttagatgactggtcaatatcttaaaaatgtatattagtaagaagttcttcctggaatttttctttcgattctggcagaataaacaggtgtttttagttttcccactgtctgagccaagcaggaccctgtcccagagcaagagatgtccccttccatctctgacccttgcctgggacaagctttgatggggggccccagcttcaaggctgtggtgggaacagcacccccaaatgccagcctctcctttcttcccatccaccagtatactgcggggccatttctggtctttgtccaacaggaaacccatttctggtgggatatgccttccagtgccacagggccactcaccccatgcatctctgtcctgcccgtcagtgctgggacggacagcaagggcaagcccagtgtctggcggataggtgggtgggaacagagaggggagaatgccgtcctaagcttctgcttggggatcccccacacgacctgggtactgcctgggaaacctgtcctaagtaaaactatggacctcgcctcgcccaccggcctgcgaagccagcatctccgtgaaggtggatggaagcgcctttgtcctcattttgagctgcaagctgggtcagcggctctgaagccctcgagtgactttctaacccaagacccagcccctggcaggaggagggtgggtgcagggctggtgggacaaaaagaggcctcagcaggcctggaagacccttccagtacatcccacagcgtgtcgagcagctgggagaacctgtgtcaagctcgagccgtcataggtccccatgaggtgtctgaagccccttcttggtgatgggaggcagaggtgctgacgttctggagcatggacgtgagtcctcagctggctccgcgtgggcccttggagggtgccaggtgtgtggtgaccttctggatgcctttaacttcatggctgcgtcattcctgatttagaactttaaccggagcttcatctagtgattgcaaaactggaccaatgggaggacggcggcgcagcccgctccctccgtggaatggagctcagctcttcggaggcatcaaagcacctgtcgcctccgtggtccccctgctgagggagtgcggcctctgcaaggttcgggggtggcttcgtttgcctggagtggccggccctgcttgtgccatgtggatgtttgtgagcctcggtcctacagcactgtgtaggctgcatctgtttcgtgctggtcctgttgacttgtatgatatccacaaataaatattttcatggcggtcgtgttgaggcatgatggttccttcccatcccaggagctccctacctgtgattggctgaacacccagtaccctgccagccacgctagggattgctgctggaaatggtggcagctgactccctaaaaacctcccctttggaggaaagagcatgccttgcccctgcctgccgggcccaggccccctcccatcctgcactctgttttctgccttgggggctggcctgggtgccccggcatgggcttcctgcaggacttcccagggcagagccctcagggataggaggcctccctgtgcaattctgaggcccagctctgggtgttggccaagggtgtctgctcctcctgggatccacctggctccttcacacctgggtggtgacgttgtagtgcctctggctgggcagatctcgtgttccctgactcatgtgcacctgtgcgataaacccacagaccatctccagcaatgccaggctggttgctgtgtgccaagaacaaggagaaggcggaaccaggggctgcagaaccagcccctccccaatgaggaccccctctggacgcccctccccatggagaacaccaggagccacagaccccagaccacagagcacacaggggagggcacggggcggccggggcagggtgtctgctgcctcgtttatgggatttgctccgcgtctagcacactgctgcctgcagtgctcctgtcccctgcagtggctactctgggcctacgggcctaatcctggttggcatgaaaatgtcctgaggctactgtgacaaatttccacaagctgagtggcttaaaggaacacatttgttctcttacagttgcaggggccagaagagtctaaaaacagtcagcagggctggttcctcctggaggcttagaggggctgaatccgtttcctgccttttttagtatctggagggcgcctgcatccccttgcttatggccccttccatcaccaaagccagtagtgtcacatctttccacctctccctgaccctgacctccgccctttctcttagaaggaccctgtgtgactttggacctacctagataatttagggtcatctctcatttcaggaacctgaatttaatcccacctgcaagtcccttttgccaggtaaggtcacaaattcacagggtctgaggatgaagatgtggacctctttgagggccatgattcagcccaccacgtctggtgacgagggatggagtgtgttctgcagcagtgggggcctatgcagacctatcccgaagttcaaggaagcagagaggccgaagaaagaagctgcccttggccaggtgcagtggctcagccctgtaatccgagcactttgggaggctgaggcaggtggatcacgaggtcaggagttcaagaccagcctggccaacatggtgaaaccccatctctactaaaaatacaaaagttagctgggcatggtggcgggcgcctgtaatcccagctgttcgggaggctgaggcaggagaatcgcttgagccccggaggtggaggttgcagtgagccgagttcgcaccactgcactccagtctgggaaacagagcaaagactccatctcaaaaaaaaaaaaaaaaagaagaagaagaagaagctgcccaatccagtttctcagaaagaaacatttaatagggacttcggaacagaagccatgtctgtgtctggggcccacccatcacccccaagcctagggcttatgtaccgtaggggaggggtgcgtgtggttcagaagggatgtgctggacagttgaagcagacagcatcccagtcatttgccctaagggcaggatttagggtaagtacctgcctttacacaaggaacaatagatgagctgaaaatctgagaggccttcctagaactggggttcatcagacaacaacagggtgggttagcctccaagctggaactgctgtggcgtgtccaggggtggggcatgtgctggcttggtcatctccccctccgagggtctgagccaaatatccagcagcaaacatgctcggccctgaagcctcagccattgtgaggactctggctgggccttcttcccccgatgggtgggaaaggccggcctcaagtccaggacctgcccttgaggccatgctggcttagggcttcaaatctgggttcctaggaaaggggctgggctccagtggcgtgggggtggggacggcagatggagggaggctgggaagggagagaaggaacctcatgggcagttaggctcccggggcttctctggggacaccaccagcagagtgtggttgttgacacctccctggggctcggggtcttcctttggccccagtgaacacctgtcacacactcgctgggatggactgaccttcagggtttgctgccacccgtgtcctccaccctggtagggcctttccaagacacttgtggggacaggccgggcctggccagcatccggtaggctgcactttccggaggcctctgggattacaggccacctcaccccagctggaattctgcctaaattactgcattgaggagattccctcacaaggtgcggactcaggctggccctgaaacagccgtcacctccacgaggccggcccaggcccctgcgcactgccctgctcatgcccccatccatgccagctcccaccaagcccgtgcccctgccaaagagctgggggaagggatgggagacagacttctctttccttatttctatttttttttttttttccagacaggttctcactctgtcacccaggctggagtgcagtggtgtgatctcaactcacagcaacttctgtccaagcaattggcctcaagccatcctcccgcctcaggctcccgagtagctggaccacaggcacaccaccacgtccagctcattaaacaatttttttgtagagatgaggtcttgccatgttgcccaggctggtctcgaactcctgggctcaagtgatccttcctcctcggcctcacaaagtgccggaattacaggcgtgagccaccactcctggctcttatttctgttttttctggtaacagctttattgagttacaattcattccatatgactcagccatttgaagggtacagttcaggctgtgattataaaggcagcactgttgaggacactgagcctggacaggtgtcccccccaaattcaatgatgtcctgcaaaaaggtccaccctaagcctggacaggtgtccccccaaattcattgatgtcctgcaaaaactcacgtccaccctgcacttcagaatgtgactttattaggccaggtgcagtggctcatgcctgtaatcccaggactttgggaagccgaggtgggtggattgcttgagctcaggagttcaagaccagcctgggcaacatggtgaaaccccgtctacactgaaaatggaaaaaagtagccaggcatgatgccgggcgtggtggcttacccctgtaaccccagcactttgggaggccgaggcgggcggatcacctgaggtcgggagttcaagaccagcctgaccaacatggagaaaccccgtctctactaaaaatacaaaaaattagcctggcgtggtggcacatgcttgtaatcccagctactagggaggctgaggcaggagaatcacttgaacctgggaggcagaggttgcagtgagccaagatcgtgccattgcactccagcctgggcaacaagagcgaaaattccatttcaaataaaaaaaaaaagtagccaggcatggtagcatgtgcctgtagtcctagctgctcaggaggctgaggtaggaggctcatttgagcctgggcgggggccgggggggagaggcaggggatgggcggaggctgcagtgagccgagattgcaccactggactccagcctgggtgacagagtgagaccccatctcaattggaaaaaaaaaaaaaaaaaaagaatgtgactttgtttggaaatgaggtctttgtggatgtaattagttacataaaatgcagtcgccccaggtgaggaccctaaatccagggcctggtgtactcgtaagaagaaggccttgtgaggccgtgtgaccacgagatcgatcgatcgcagtgaagctgctccaggcagaggaccgctgacaccctggagaccaagacaacagctgcttcaaagcgagggtctgaggaccaggcatagtggctcacgcctgtaatcccagcactttgggaggccaacacaggcggatcacttgaggccaggagttcaaaaccagcctggccaacatggcgaaaacctgtctctactaaacatacaaaaattagctgggtgtgttggtgcacgcctataatcccagctactcgggatgctgaggcaggagaatagcttgaaccccggaggcagaggttatagtgagctgatatcgtgccgctgcactccagcctgggcgacagagtgagactacatctcaaaaaaaaatgttttgggttcaataacgtgaaaattgtgccttatccagcaagtggtgaatttcctgagctcctgtgacccccaccaaggaagagcagactgaacaggcttgggaaatttttctgtgaaaggggagggcctgggggtgcgagcaggctcacgcccagtgtgcactgggcatgctcaggtgtcagcagccgagccagcaacactgggatgacgccccctttttacaggctctcggaggtcgggtgggattcccaagacctcacaggtcacgatgaatggcctggctggaactggcttccacggacccagcatcataggcctccctcagagccgggccgggtccctgagctcactggaaggacgcgtccgcctggctgtgctgattgtttacacagacaccacctggctgattttctctgaacagtgtgaaagtgacgcagaaggctagtggccccaagttcacacccatggccctgagaaagcagttgtgtgtgtagcctcctcaccaccctctctgcgtctggacatgggaaccttgcgggcacacacatgcaaacacatgcgtacatgcgggcgcacacacacgcacacagggatgcacacacacgcggatgcacacacagacgcacacatacacacgcagatgcacgcacacgcaaacgcacccacatatacatgcggacgcacacgcggaagcacaggcacacatgcacgaacacacacactacacggatgcacaggcacacacactcgtggacacacagcatacacacacacagatgtgtccagacatctagttattcacgcccttgttactctcaggagcagcacagcgaccccgaggctggcctgactgtgtggcctctgagggtccagtcttcactttcccttgttggggggatggggcccccatgcacagtctgtgcctcagtgttctgagtgagggcaccctgtgctctgccccatgaccctccctgcctcggtgctacccttcctggaggcgggacacggcggctgatccctccctgagtgggagttgcgagtcctttgccttcttcccccgtctccggcttgtagccacaaaatgtgctgccctgggccctgcctcaggtttccctacggaaacggcacaggccacgctgcctcccctgctggcaccctagtctctgatggagaccgtggcctctccacccagaaagtgggccaggcctcaccatccctgagctctgtctgcctacgtctctggctgccactgaccccaccagcatcttggcctctcgacacaccccctccgccctgactctgtgtcatacccaggcctcacgacacactcctgggcaaggctgcgtcggcagcgccctggccagggctgtggtcgggccatggagggggccccctggctgagaccacaccctgtacccccaaaagaggtcatcctgcccgtgccagaaaccccgtcagggacatgtgcacccctggagtgtgggcgcagaggccggccacatttagccagttgtacattcattcaggctgcaattctttcttatccctgggctcagggccgcacccagacacacgaggccgggcaggcatgactcagcagcccttaggatctgcgtcctgtgattttctcaaggagcacaaaggtgagcgtagccatgggggagaatagggaaggaagaagggccaacagtggccgagtcagctctgcttagtctgaactgcccctcccattgctcccaggccgggcagcagcctcttgagcagccccgagccccgctcttgtccttccagccggctctcaggggctcaccccctccccacccccacagtcagccttgcggtcagctttctctaaaggcagctccgcacacgtagctctccctgccccacgttgtccacagcgctccctgcccccagatcccagtgtccccaccacagctccgcaccgctccttgatctgggcctgcattagcatccccgggttatgtggctacccgtgctgcaaaggagcctgggaagtgtgtcttttccatctgtgcgaaattctatagtttttctcgcccttaagggaggtggggagaaggatctgggcagggaaggcccggcccatccctggccacctatgacactgtaagcctcttagagagcggccatgcctgcctcgctctgcaagcagacctgcagggtgcctggcacgaggacattcagatgtgggaaggagggaggagggagagacgacctggaaaggaatgagtgtgagctcagtcgatggtcagggactgtgcccaaccagggcctggctgtgccgtggggagctctccgagctctgagcatccaaatgttggagtcctgaccctgccttttgtgggatagaaaatgggaattaacaccgcttctgggcagctcaattaggaaatcttagacgctctacctggtagtggaatgattagattactcaagcctacaattttatcttttgcacaatttgcatccaattatgttattctgtctctaatctagtgggaatctattctcatctccatcagttggccctgcttcataacgcacgtttcctgacagcagttagaggagagactgagtaaggctgtggtggcatctcccagctcctttgggctggtaaggatactgttggctttgcctggctccccccacccagaccctgtctacacagacagaacctcagctaacacagagcctggctgctctgttctgccagatcgggaacacatggccagcaaaacctgcaggcacagggcgcggcggctcacgtctgtaagcctaccacattttggggctgaggtgggtggatcacttgagctcaggagttcaagaccagcctaggaaacatggcgaaaccccgttgctacaaaaaacacaaataattagcagaacaaggtggcatgcatctgtagttccagctgctcaggaggctgaggcaggaggatcacctgagctaggggaggtcgagactgcagtgagctatggtggccccactgcactccagcctgggcaacagagtgagacccttgtctcaaaaaaacaaaacccaggcctggagtgggggctcacgcctatagtcccagcactttgagaggctgaagggggtggatcacctgaggtcaggagttcgagactggcctggccaacatggtgaaacccggtctctactaaaaatacaaaaattagccaggcatggtggcaggcacctgtaatcccagctactcaggaggctgaggcaggagaatcacttcaacccgggaggtggaggttgcagtgagccaagatagcaccattgcactccagcccaggtgacaagagtgaaattccatctcaaaaacaaacaaacaaaaaaacaaaaaaaaaccctaccagctttgggaaaagtgatgctcgctgagaattcggggtggagggtaggagacccaaccaagatgacactgtcactcgagagtgagtgacagctggctggggacccgcagctgcctgctcagcccagggagcatgcctgcctcaggagcttcagagtgagggtctgcgctctcagcgtggggcggttccttgcctagcatctgttgagtgcatttccatcagccagggccccagtggaaacaggcagcactcacaggagcaactcaagcagcgtttggtgtccagcgtgtggaagcggtgttccctttcaggacggggcccgcgttacaaacggggagctcaggccaggccgtcctgggctcctgcacgttctggactttgcgcacccacccctccaccttcccgtcctacctgtgacttgagcaggcgcccaggctgtagggcggactgcaggagaggggctgcccctggagggggttgtaggcctctgctgccctggctccccttgccgttttcatttatttatttattattattattatcttcaagacaggatctctctctgtcacccaggccagagttcagtggtgtgatgatggctcactgcagcctcgacctcccggctcaaatgatatgatcctcccacctcagcctaccaagtagctgggactacaagtgtgtgtcgccaaacctggctaattttttattttttgtagagataggggtctcactctgttgcctaggctggtctcaaactcctgagctcaagtgatcctcccacctcggcctcccaaagctcaagccatttttaacattgccgaggcagttttggggaaacatgcctgaacgaaccatgagtaagacctccacgttttctttctggctctcaggggtctggaggggaagtggctcatggcaggtcccagcacgtaggcctctgttttctggttcatgttccaggatggggaaggacctaagccatcagtgtcctggagatccagcgtcttaattcattcagggtagcccgtcccgccctccagactgctgggcacaccaggggctctgctcctgctctgtcccaggactcagggcccctccagggcagctgccgtgacgtcgtggctatgaggcattcagccgcctcccagaatgcgccatgctcttgcccaacctggactccccactctctgctgctggcgccaggacggtctcacccacctcagcctctagctcctcctcctcaagcctcaggtctgaacttggccatggcctctgcccagaagccttctgcacctctgtcagatccccgtttacccccagcaggaccctcccttagggcacttggtacaatttcacatccgtgacagtgacagtcaccgcccccatgctgtgagccccacgggagtccgagctgacttcattcttcccctactacgtgcctcatccactttgagctcctgtattagtccattctcatgctgctaataaagacatatccatgactggataatttataaaggaaagaggtttaattgactcacagttcagcatggctagggaggcctcaggaaacacaatcatggcagaaggggaaggaaacacatccttcttcacatggtggcaggaaggagacgtgccagcaaaagcggggaaagccccttatgaaaccatcagatctcatgaggattcactcactatcacgagaacagcatgagggtaaccacctccatgattcaatgacctcccaccaggtccctcccatgacacgggattatgggagctataattcaagatgaaatttgggtggagacacagccacaccatatcagagctcctaatgcactctcagagggcagggttaaaccagcggggggttcggttaaaccagcggggggttcggtaacaagggacttttgtcagcgggtagtgaaattcatcagatttccaagctgctgctgttgatgctcctaaggaagcagacagcgtgtggatgaaattgacaacttcatataaattatatatatatatagagagagagagagaaacggagtcttactctgttgcccaggctggagtgtagtggtgcaatctcggctcactgcaacctcctctgcctcctgggttcaagctattctcttgcctcagcctcctgagtagctgggattacaggcacctgcctggctagttttttgtattttattttatttttttcagtagggatggggtttcaccatgttggtcaggctggtcccggaactcctgacctcaagtgatccacccacctcagcctcccaaagtgttgggattacaggcgtgagcctgtaattttgatccctttgtcaacttgtatttaaaccagaccacagcattaattacatattttattttctgttttacactgatatttcctgtttacacacaagcttctaaccctaaatccagcttcccccaacccaggtgccccataggagttcctggtcactgctcctgcagacaaccgctcccttcctgttggggatggctctcccgctgcgtggtcccctaaacagcccctcccccacctgccttccgctggaaattctcaagtgggaaatacaacgggttttcctttcaatgcaaaactgcttgattctgttttgcatgttataaaagcttagtctcagagttcatgttaagagtgtagaatacacacagtccatgattcagttttctttttggtttttttttgagataggatctcactctgtcacccacccaggctggagtgcagaggtacgatctcggctcactgcacccaccacctcccgagtccaagtgatcctcccgtctcagcctcccaagtagctgggattacaggcgcctgccacaacgcccagctaatttttttattattagtagagacagggtttcaccatgtgggtcaggctggcctagaactcctgacctcagagtgatccacccaccttggcctcccaaagtgttgggattctaggtgtgagccaccgcgcccggcctgattcagaatttcctaacatcactttcaaagctctgtggactcactggtagatccctccttagtcttcacagatcccccacgatctggacagcctgaaccctgcagctgcagttctggcatacgctgccggacgcctcggaggcaaagcgcagctcaggacaccctcaggaacacgttcacatcatgaccccggtgcacagagactttcacccccagtcttagctcttatcatgtatgatgctccctcttctgtcctatttaacatagaatcacagttgggaaggcaccggaccaattccatgaatgggaagtaatccctgttgaaaactagaaggtgtttttaaaaacagccacgctctcctaagatacctccctttagaagcccacgtggctccatgggaagcctcccgcaccacagggcactcagtgaggctgcaggctattctgcacgtgcacgacactgtgtggctgcctctccgtaccagagcataaagtgcgtgaatgtatctgagatctggagccagttatgctctggaattggatttactcacactcttttattttatgggagaaactgaagcttggggccaggacctaagagtcaaagcaccaacatgtaaagagtggtggttaggaacgcgggccggagtgggcaggtgtgaatcctgggtccaccacctgcttgctgtgtgagccaggcagtctctccgccctccatgcccccgaggggaaggacctgcccggggtggttcagacgaagaaaaaagtctaaaacaaaggaggcaatctgtaaggattttaaaaatatatctattttgaaaatattctgaaagtaattaagatcacctattgggaaggaaagaaatcaacacaatgaaatttaggaagagaaatgcaaaagcagctgcagaatcctgccccttccaccccaaggggcacagcccggagatgaagcttattttaggatcacaagtgcacgctctggtagacggaggatgactttgtcagtcttctggctgaagggccttgtccaaagtcaggatcagaaataggtcagctcatcatgcttggctttgttggtctggtagttagataaggtcaagggcttgttttcatgagggagagattggaacactcgcaggtgtacgaagtcctcgtcgccgacgtgcacctgggaagagagcggagtgagcgaagcctctgatcccaagtcaccttgctgcgcccctccaggtcattagcagccagctgaagacaatcttgtcttctcctgcatgtgcaggggatgcctcacatcccacacttgtttccttggggttcttagctccccagaagccctagtcctcctgaaaggccgatggacacacacagtaggatgcttatctcagggggcagccacagggcgccccagcacctaagaccacacagcccgggcctgcacaggcggtttcctaccagcacccgttcggggcaggccctcctgaggcccacactctaccttgatgaagtagtttgtccccgcgaccacctggctcttgaatgacacggccttaaacacagggaacttcttgttttctttctcttcaagctgggacctcacctagacagaagggacagaatgaggatgtctcagtggcttcttggattccctcctgctagagtaacttgcacgcatgtgagcacacacacgattctgacactggctcttcacacaattgtctcttacaactgaagggacatttaaactgtcagcctaataataaagtagaaaaaaacagttccagctgggtacggtggctcaaggatgtaatcccagaactttgggaggctgaggtgggcggatcacttgaggtcaggagtttgagaccagcctagccaaatggcaaaaccccgtttctactaaaaatacaaaaattagctgggcgtggtggcgagcacctgcaatcccagctactcgggaggctaaggcaggagaatcccttgaacctgggaagcggaggttgcagtgggccgagattgtgccactgcactccaccctgggcaagagtgagactgagtctcaaaaacaaaaaaaaaaaacacaggcctcagcatcgcctggacctgttcttgcttggggcatcccgtcggtcaccaaccatgacagcgaggcgggcctggcctgtgctccaccggagggggcttcttgcacagatgacctgctcatttcagcccctccagaatcttctggcaggcgcagagcaacaggacgtccattttacagacgaggaaaccgagacacagggaaggttgccatctgcaacccagcccggtttttatcttgtttttctgtgttttaactttttatttagacttacagtttgaaacagtgctagaatcggaagcatgtaaagaaacctgtggaccttttatgcagatacacttaagtttttaacccatgtgccttatcactggggacctcttgcactctctctcatgatttttttcccgaactagatgaggatattgacaaagattcttgcttggccaaactgtagtcgggctcctgaagcgcctaggccacctgcgcacttccttgtaaaatccacttttagcaagaagcctggctaagtcagtttagccagacccttcccacccgcttgctatcggatcaccgtggagatcggagccggctgctcacctgcgccatcgccggcgacgcccgatcaccctgcctgcctgaaaccagaagcgcctcatccctggggtttcctctcagagactgtccatgcagggaccgcaccctgctccgggctatcaattcccactcgcccttgctgtattcagcggagcccaatgtctccccagcggcgccccaggcgcggccccccgctgctcactcgcgcgcagcgcccgagcggagggaggcctctcacggccacagcccgggccagcccaggggtgcgcagcggggccaaagcggcttctttcgctccaggagccgcggccgcgccctgaggctaaggcaggactccgggccggccccgtccccgcggcccacccacctggtcggcgatgtgctgggtctcggcggtggccggctgcgtggcggagggcgccccgcacatcatcttggcggcgacggagggaatctggcgaggggactcggcgaggggacgcggcggctcctcagcccaagtaggcgctggggtcacgtgacgcgcgggcggaaccaaggggcggggaggaggcactttggcttcggagtcccctgcggggtcgcggtggccccgcaagaagggacgcgcggggcggggcgcggggcggggcgcggggcggggaacctggccaccactcgccgcaggctgggtctccgcgcccagcgctggtgtcgggagggagcgcccccctcccggggctggtatcgtctttccgggcgccgagtcacacggaccggggcgggggcgcggccgggtgtcgccggtgggttgggcgcgcagggtgggacgatagggaaggggcagtcggagtaggcgcaatcctgcagggtggcggggtccgggccgcgcacgagggagggcggggcgcagcgctgcaggggtcaggggtcaggggtcccggccccgcgggagcaggtgtgcgggctgcagtggacatcaccgcttgtgaccgagaacactgaaggctgaagggggtggacagaggggcccagggagggggagacggcgcccacgcgctccaggctgggtgggggcagggggtagatcagagggatgagaagaaggcagggttctctggtggaatttgcgttttaggatttcttttctttctttccttttcttttctttttttttttttttttttttttttgagacggagtctcgctctgtctcccaggctggagtgcagtggcgcgatctcggcttactgcaggctccgcctcccgggttcacgccattctcctgcctcagcctcccgagtagctgggactacaggcgcccgccaccacacctggctaatttttgtatttttagtagagacggggtttcactgtgttagccaggatggtctcgatctcctgaccttgtgatccacccgccttggcctcccaaagtgctgggattacaggtgtgagccactgcgcccggcctttttttttttttttttgagacggagtctggatctgtcgcctaggctggagtgcagtggcgcaatctcggctcactgcaagctccgcctccggggttcacaccattctcctgcctcggcctcccgagtagctgggactacaggcgcgcgccttcatgcgcagctaatttttgtgtttttagtagagacggggtttcaccatattggccaggctggtctcgaactcctgacctcgtgatccacctgcctcgggctcccaaagtgctggaattacaggcgtgagccaccgtacctgacctcttttctttctttcttttttttttttttgacagagtcttgctctgttggccaggctggggtgcagtggcctgatcacaactcattgcagcctggacctcctgggctcaagcgatcttcccacctcagctgctatagtagctgggaccacaggcccaccctaccacacacatatatagagacagagagtttcaccatgttacccaggctggtctggaacttctgagcgatctgtccacctcggcctcccaaagtgctgggattattggcataaaccactgcacccctaatttttttaaaaagtgtttttgtagagatggagtctcactatattgcccaggctggtcttgaactcctaggctaaaatcgatccatcccccaaagtgctgggatgacaggcttgagccaccacacagtccctttggtttagggtttctgttagactggaccacctgcggaagggaagggtcgcttgccttatttggggtgggggtggggcctgtgctaggcacctgttggtgtgattgactcctcaaaatgacccagagcccccacccaagggctgtccctcagggggactggtccgctcctgcatgcaaggccccagctggagcggcccatgaatgggttgtggggtcctttctcttacctgccagggcacagcctggtctgtcacttcagggaagggcccaaaggggtgggcagtcaggtgtggttgaagcctggggggagcggggcagagccccccatcattgttgaatgagtgaaggcagagttgaccccacgaaaatggaaaactcttctatgtggaaagcaaagcatcaggggaaaacatagtcaagaagagaaagggatgttcccgctgcttgtacggttcctgcagctctgttgggcttgtgccgtggaaggtgttggccttgaggcctttgttcctgaggtgcttcctggagtcggatcctcactctccttgctggagctggtcccaggtgcctccgttttacaaataggaggataacagctgtggaaataaagcccacgcaaatgagaacaaaagacgatttattcaggacttgctgtacaagggagtcgccgtcctctcttgtgttgaccgagattcctcagcaggcgggggcagagccggggaaaagcctggaatgggaaggggaggctcaggtgcacctgagggaggctgtggcctggggagacggaagaggggctcactaggagtgtgaccgtgacaggtccgttgcctagggtgcaggaagtcagcacactgccacccagggtttgcagcagacagtttgaaccgcaaggttgtaactgggaggagacctcaaatccatctccctgaggagtttggggctgggaactttcaggggtttggagtgggctgagggcgggggctgctgaccggtggagaagtgcagggtgaagcagggtggagtcatggggtggggttgaagatgctgtattctcatgctggttcacttcctctgtggggctcttcaaactggttggcctggaattaaggatctgaaacgtcttaaggaattcttaaacaaaagcctcatgattctgaagtcagagattccgtccataggaacagtaggggtgcagatagtcactagcgctacgtgactttcagttagaaggaagtgggttaaagtgtagcctgacaaatgctgagttatccttctcttcctccctcccccctccctccctccctctctctctctctttttctctctctctgtctctttctctctttctttcttcagagtctcgctctgtcatccagactggatggagtgcagtgccatgatcttggctcactgctgcaaccactgcctcccgggttcaagcgattctcctgcctcagcctcccgattagctgggattacaggtgcgtgccaccaagcccagctaatttttgtatagagacggggtttcaccatgttagccaggctggtcttgaactcctgacctcaggtgatccacctgcctcggcctcccaaagtgttgggattacaggcatgagccaccacacccggcctgtaactctatttctgctgaatgcttagttataataaatatataataaatataatatataatatataataaatgtacagaacctgggcagaaagcttctggctagccgtgaaagttgaggtttggcctctggacagtcgctgtggctcagagttctcttcccatatttggtctggctgttttctgtttgtgtgttcattgtctcgcaatgtcaaagctgccttcgtgctgcaggtgtgggtgcaagcagatgttttcaaaccatcttggagggcaggtgctggagcccagctgcctgagtgtggacccagcccttcttcgcacctgctgtgtggtgaaggactaattgctgaaactctctgtgcctctctctgtggggataatgctaataaccaatctcaaatttttttttaaaggactaagtgaattagtaattaagtacaaaaagcttgggacagtgtctgagctccagggtgagttgtcagtattgttattattggtatgctaatcaaagccaacctagaatttgtattacttttccaatcaaaagccctggaattttttattttatttatttatttttttgagacatggtctgattctgttgcccacactggagttcggtggcacgatcacagctcactgcagcctgacctcccaggctcaagcaatcttcccacctcagcctcctgagtagctggggccacaggtgtgcaccaccatgcctggctaatttttttcattttttgtagagctggaagtctcactatgttgcccaggctaatcttgaaatcctgggcccaagtgatcctcccacctctgaaaccacctttgcaaaaattgtatccatgagaaaatggtggcagtgggagagatctgaaccagctgacccggctctggcctttagcttttaagctgccttgattattcctgggtttaggctgagctaactttggcagacatttagtttacagtttagatgatactggcccttccccaaaactcaaccacctttgcaaagctcatgagagactaggctaggagaaggagaggagcctgggttcagctaaggtgtagacaaacaattgccagccattattctggaggtcacaggacagcaacctccccagttagtcctgcagttaatgtcgctattgtagactggccttttgagatacttttgcaggttttgggcatgtctgacacccatggctctacctggacccactgaccatggctcctgtggcccctcccagaagcaactcagtgcaaaaggacatcttcccatgatgtcatctccgacccactcggtcagcagcaagcacccattgcccagccacaccaaccccttcccccaaaccacttttgaaaaaccctaacccacaggcctgcaatgaggttgatttgaataattactccatctcccttgtggcatggccaggccagcctcacatcaattcactttttttttttttgagacagagtctccctctgtcgcccaggctggagtgcagtggtgcaatcttggctcactgcaacctctgcctcccgggttcaagcgattctcctgcctcagcctcccaagtaagtgtgattataggcatgcatccccatgcctggctaatttttgtatttttagtagagacgaggtttcaccatgttggccaggctggtctcaaaactcctgacctcaggtgattcaccccccttggcttcccaaagtgctgggattataggtgtgagccaccgtgcctgacaattaactttcttttcttcagtgccgtggcctttgtacagcaggcaggaagaacctgttgggcggtcccaccttggcctcccaaagtgctgggattacaggcatgagccatcacgcccaaccatgctgacttttacctcccattctttgatgccagagtttttcatttactgaaggcaaggggacaagaccaaataccttgtctccccacttagagaatgagaaagaaaaaaattatgaatatttcttatctgaggaaaatgaaccctttttttttttgagatggagtctcgctcttgtcaccaggctggagtgcagtggtgcgatcttggctcactgcaagctcctcctcctgggttgacaccattcttctgcttcagcctcccaagtagctgagactacaggcacccgccaccatgcccggctaattttttttgtatttttagtagagacagggtttcaccatgttggccagaatggtctcgatctcctgacctcgggatctgcctgccttggcctcccaaagtgctgggattacaggagtgagccaccaggcccggctgaaagcgaacccttttaagttatcaggcccagagagaaattaaaatgagacagtaatcacatgctgtttctcctagagctgtgtcaccatctctggagactgcttcctctcaccacaagtagctgtaagtgaacctaaggatgctgcacacaggacaccgtaatcccatacaatgtatagccaatcactaatcaatattatttctgtaaaccaatgagaattcctgatagacaattttgtatcagcctgctccttgtcccccttttgtctttaaaaacctgcttgtcggctgggcgtgatggctcacacctacaatcccagcagtttgggaggccaaagcaggtggatcacgttaggtcaggagttcgagaccagcctggccaacatgatggaaccccgtctctattaaaaatgcaaaaaaattagctgagcttggtgtctggcacctgtaatcccagctatctgggaggctgaggcaggagaatcacttgaacctgggatgctgaggttgcagcgagccgagattgtgccactgcactccagcctgggcaacaggagtgaaactccgtctaaaacaaacaaacaaacaaacaaacaaacaaaaccctgctgtcacgaaggtcaaaagcagctctcaccaaggcaatgtggaagtgtgtcttgctgtcctcaactttagcccacgcacagtctctacatcaattctgcctcagcttcttccttcaacaaggaagaaaggaaggaaggactgacaagacctgggggcacctcagagactttgaacatcacttacatttgaaatctgtattcagaagaatcaaagtttgaaatctaaactatttcagaatctcacttttgaaatattggatttccccagggtcagtagaaccctagtgtgtttgattgcttgatttttcttccatgtgccttcttcctcagcatgctgatcaggtttcttgggggtttttttgggcttcctgttaatactcctaagcaggtgactcatacacctgttcctggttccaatcagttgtttgtgtttccattatgcaagagtttcatcatgagaatttgttgttaattaaattctagacatcagagggtctcagcccaagcaataggtgttgggggctgtgggcaccaggcgctgcagggggactgtgggccccatcctggcaccctgttcatgaacctgcaggtgatgctgtggggagctctgcctggtgcgaaaactgctgacgtggtgggctaaggcggtcaaacccctctgttgcaggatgtcccagtggacctcaggtccttcctgtttgctgagcttgtgtttcagctgcctttctttcccactgcaaaccctgccttcttccaaaagctgccggtagatccaaagccctgcagacttctactcaggttgcgacatggcaacgtgaatgccagtactctccacatttctatttgaggatttcgcaaaagctagtggcttccaaggacaaaggcctgagaccgtgcacgaaccattcacccttgcatctggctgtgcaccttactcacacgtccctttcatatgtctgcgttggctgttgaagagctcctactgcaagtatgcaagtgtggggagaaaagaaagaaaatgagggaaacaaccagtgagcctgggagggaggcccgcggggcacttgcctgtgggacccaatacgaggaaaaccgctcagaacccaggtcttcagcagcattcgaaacacacaagggcaagatggtggcaggagtgtcattaaactctcatcctgcacgggcactgggacggacagatcagtcagcggtgggtgtgcagtgcgctgtgggctatgtcatagggatgtggtacccagcacatcagtgtgtgaccaggtcttgctgtaggatgactgagcaggaccacaacagaaactggatgagcttctaagagcatggcctgcttgacactgttacaggaaaggggtcccgatccggaccccaagagagggttcttggatctctcacaagaaagaattcagcgcaagtccgcagagaaaagtgaaagcaagtttattaagaaagtagaggaataagagaatgactattccatagagcagccctgaggactgctggttgcccatttttatggtttttttttgatgacatgctaaacaaggggtggattattcatgcctcccctttttagaccatatagggtaacttcctgatgttgccatggtatctgtaaactgtcatggtgctggtgggagtgtagcagtgaggatgaccagaggccactcttgtggccatcttggttttggtgggttttagccggctcctttactgcaacctgttttatcagcaaggtctttatggcctgtagtttgtactgacctcctatctcatcctgtgactaagaaggccttaaccatctgggaatgcagcccagtaggtctcagcctcattttacccagctcctattcaagatggagtcgctctggttcaaacacctctgaacatgttcatgcattgtttgacccacagtagataagcctgaggctaagcccttgactcataattctcgagagcatatcaccaatcaggaaaatgaatagtggcagccaggtatgatggctcatgcctgtaatcccagcactttgggggaccaaagtgggagggtcgcttgagcccaggagttcaagatcagactgtgcaaggtaatgagaccccatctgtgatggttcatactgagtgtcaacttgattgggctgaaggatgcaaagtactgatcctgggtgtgtctgtgagggtgttgccaaaggagattcatatttgagtcagtggctgggaaaggcggacccacccttaatctgggtgggcaccatctaatcagctgccagcaaggctagaatataaagcaggcagaaaaatgtaaaaagacgagactggcctagcctcccagcctacatctttctcccgtgctggatgcttcctgccctcggacatcggactccaagttcttcagttttgggactcagactggctctccttgctcctcagcttgcaaacagcctactgtgggaccttgtgatcgtgagagttaataattaataaactcccctttgtgtgtgtgtgtgtgtgtatatatatatatatatatatatataaaataggatatatatatatatataaaataggatatatatatatatataaaataggatatatatatatatatcctattagttctgtccttctagaaaaccctgactaacacaccatctctacaaaaaataaaaaattagctagctgaggtgatgcacacctgtggtcccagctattcagaaggctggggtgggaggatcacttgagccctggaggtcgaggctgcagtgagctgtgattgcaacactgcattccagcctgggagatagagtgaaactctgtctcttaaaaaaataaataaaataaaataaaataaaagtagtgggacatttcaggccgtttaaaaatttgaaattttggtctttaatattcattaaaaaccaggtcatattttcttgtctccacctctagcccgggggaaaagagaaaatacagtgaaaaagaggtttaaacttagttttccttaaggctgagccctagtgtgactttcagtcagaaatgggttatactgtggccaggcgtggtggctcacgcctgtaatcccagcactgtgggaggctgaggtgggctgatcacttgaggtcaggagttcgagaccagcccgggcaacatggcgaaaccctgtctctactaaatatgcaaaaattagccaggtgtggtggtgggcgcctgtagttgcagctactcaagaggctgacacaggagacacttgaacctgggaggcggaggttgcagtgagctgagatcacgctactgcactccagcctgggtgacagagcaagactctgtcaaaaaaaaaagggggaggaggttaccctggagagcgtttttgtttctgccttcaacaggtcatgccagcagaagagatttttttttttttgagacggagtctcactctgtcgcccaggttggagtgcagtggtgctatctcggctcactgcaagctctgcctcccaggttcatgccattctcctgcctcagcctcccaagtagctgggactacaggcgcccgccaccacacccagctaattttttgtgtttttagtagagacgggtttcacctatgaggtctggatctcctgacctcgtgatccacccacctcagcctcccaaagtgctgggattacaggcatgagccagcacgcccagcccgagaagagattttttaaaagccactttattcgatttccaaatcttagtcttccatatctttagagaccacctgccatgtcctttccgtctgaagcctggcatctcgagcctggtgtgaaggtgtgctccccagtgcacaacttcaccctcctagtacagcttagtccctcccaccctgttctcagcagctgggtgtgacatacccgctatgtgcctgatatacccactatgtgcgagacatacccactgtgcacctgacatacccactgtgagcctgacatgcccattgcatgcacgataccacccactgtgtgcatgcgacatacccactgtgtgcaacataccaactgtttgcatgacatacccactgtacacctgacatgcccattgtgcgcctgacatgcccactatgtgcgtgcaacatacccactgtgtgcgtgcgacatacccattgtgcgcacgacatacccactgtgcgcgcgacatgcccactgtgcacctgacatgcccgctgtgtgcgtgcgacatgcccactgtttgcatgcgacatacccactgtgcacctgacatacccactgtgcgcgcgacatacccactgtgtgagtgcgacatacccactgtgcgcgtgaaatacccattgtgtgtgtgcgacatacccactgtgcgtgcgacacacccactgtgcgcatgacacaccctgtgtgcgcgacatacccactgtgcgcctgacatgctcattgtgcgcctgacatgcccactgtgtgtgtgcgacatgcccactgtgcgcgtgacatgcccactgtgcgtctgacatgcccactgtgtgcgtgccacatacccactgtgcacctgacatacccactgtgcgcgacatacccactgtgcatctgacacgcccattgtgcgcgacacacccactgtgtgcgtgcaacatacccactgtgtgcctgacactgtgtgcatgcgacatacccactgtgtgcgagacatacccactgtgcgcctgacatgcccattgtgcacctgacatgcccattgcgtgcgtgcaacatacccactgtgtgcgtgcgacatacccactgtgcgcctgacatgcccactgtgtgcgtgcaacatgcccactgtgcgtgacatacccagtgtgtgcgtgcgacatacccactgtgtgagtgcagggcctcttctcattcgtgcttgtcccccggaaagtcatgtccgctggaacctcggaatgtggccttaatttggtaaacgggtctttccagacatggttagttaacatgaggtcatgctaaattaaggcaggcctaagtccacactgactgacgtcctcataagaagaggagaggctggctgggtgcagtgcctcccgcctgtaatcccagcactttggggagaccgaggcagcccgatcacctgaggtcaggagttcgagatcagcctggccaacatggtgaaaccccatctctactaaaaacacaaaaattagccagaaattgcttgaatcctggaggtggaggttgcagtgagccaagatcgtgccactgcactccagcccgggcgacagagtgaaactgtctcaacaacaacaacaacaacaagaactaattcagattctaaaaccagttgctaaatgtttccttttttttttctttttagacagagtttcaaaatctgtcgcccaggctggagtgcagtggccggatcttggctcactgcaacctccgcctcctgtgttcaagcaattctcttgcctcagcctcccgagtagctgggattacaggtgctcgccaccacacccagctaatttttgtatttttagtagagatggggtttcaccatgttggccaggatggtctcgaactcctgacctcgggtgatccacctgctttggcctccccaagtgatggttgggattacaggcatgagccaccactgccagccttttcaactttttatgaaaaatttcatacatagaaaatgtcagaagataggtcaatgaagacctgtattcctgcctgtagacgccacacttgtatttttttgagacggagtctcactctgtcacccaggctggggtgcagtggcgcgatctcggctcactgcaagctccgcctccggggttcacgccattctcctgcctcagcctcctgagtagctgggactacaggcgcccgccaccacgctcagctaattttttgtgtttttagtagagacggggtttcaccgtgttagccaggatggtctcgatctcctgacctcatgatccgcccgcctcggcctcccaaagtgctgggattacaggcgtgagccaccgcgcccggccaacgccacaactgttaacagtgtgccatagttgcttatctgcatacacatatgtgcgtgtaatgatttacttttttgcagaatgaattacagacatcatgacaggtcacctttaccaaagagttctgcagttatttctaaaaataaagaatatttttctacttcagggtatgtcaaactgtggccctaggccaaatgcagcctccccgtttttttttttgttgttgttttttgagacagagtctcactctgtcgcccaggctggagtgcagcggcgcaatctcgactcactgcaacctccgcctcccggattcaagcaattctcctgcctcagcctcctgagtagctgggattacaagcgcccgccactacgcctggctaatttttgtatttttagtagagacagggtttcaccatgttggtcaggctggtctcaaactcctgacctcgtgatccacccgcctcagcctcccaaagtgctggaattacaggcgtgagccaccgcgcccggcacacccctggttttaaaaataaagtttcgagccgagagtggtggcgcccgtggtcccagctcctcgggaggctgaggctgggggatccctggagcccgcgaggcaaaggctgcagtgagccgagatcgcgccttgcactccagcgtgggtaacagagcgagaccctgtctcaggaaaaaaatacaagtggggttataaataaaatgagattaaaaaacaacagatctttgcctcagaatcccgacccaccgcagccccagcgaggcgcaggcgcaggcgcaggcgcgcgctcgctggttccgcccatgcgcacaggcagggagcgcgcgccccctctgtagccttcggcctccgggggctgcagttgcgcggctcggccactgcgcggcggtggcgtgcgcctgggcggtgtcgcgggctgtgacgtcacgccacgcgccggggccaggaggaggcgggcgcaggaggcgcgtgctcagtgtgctgggtaccaggcgactccgggacagggggtctcggccgtcggcgtcatggtttcgcgcgtgcagctcccgcctgagatccagctggctcagcgcctggcggggaatgagcaggtgacccgggaccgggcggtgaggaagctccggaaatacatcgtcgccaggactcagcgggccgcaggttggcgggggtgtgggcggctggcgtctcgggggccggctgggctggtgcgggtgtgggcggcggcggccggagctgggggccctccgagccctgtggaacctccacgtggccgggccgggcaggcggggtccactggcctgttcccgctgttaccggcccacggcccccgccgccgctttccctcgtggtgcggtgactctggtccctctgcgagaacgctcctccccagccccgtaacccctttcctagctcaggcgtcccctccctccagtagaccatgtactcctgctgccctgctgtttgggcacccagtatttttccctcatggcagcatttcccactgtttgcagttttctgttttgcgttaattattggattgttttccgatttccactcgagagtacctctctgagggccgagaatctacttcttgttcatggtaccaggtggttctccgagcgtggtcccccatcagcagtagcatcccctggacatttgttagaaatacacgttctatgccgggcgcagtggcccaagcctgtaatcccagctacttggcacgtcgatgtgggaggatcacaaaggcccaggagtccagcctgggcaacatagcaagactccatttccatcgcaaaagaaaagaaagaaatgcaagttctaggatcccagccctactaaatcaggactggcatctgctttatgaagctgttcaagtgcttctgctccccacactcagcctgagaaccactgctgcaggaacaggttgccagacacataggacttcagtgaatgtcaactgagtaatgttttaaattaaaattttttgttatttttctgagtgagacagacctcactgtcatccgtggtggaggagtgcattggcacgattacagctcactgcagcctctacctcccaggctcaagtgagcctcccatctcagcctccccaatagctgggactactggcaccgtgcggccaggccagctaagttttgtattttttgtacaaattggggtcttcctatgttgcccagactggtcttgaactcctggcctcaagtgatcctgcctcagcactcaattccaaagtgctgggagtacaggcgtgagccaccgcacctggcctcagtaatttctgtttctctcgtagtctgaatgcctgagttcactttcttcttttagtatttgagatatattacaggagagtgcagaagccctcagtataatgctggatgaattatcaccaacagattaaccttgtggccactgtccagcttaggaaaccgtcaaggttcgcaattttgaatttccaaaatggagtatggtgcctgataccttgtagatctcagtcggttttactgtgtgcgtgaagtagcagttacctggagtagccgcatagccacaggcgcggcaggttctgggttagaaggattgtttgaaggggagggccagattctgccccccagttgcctttaccgtaagtgggactttggtctcattcaggcagtcacgtttctgtggcttcctttctggcactcgaaggtgtgggattcatttggtccaaccgttgctgttttgatgcaggtggttttacgcacgacgagctgctgaaggtgtggaaaggactgttttattgcatgtggatgcaggacaagccactcctccaggtgagtggggggagcagcagagcaggtacagaagcagcgggggaggatggatgggcatctggtcaacccagtttttcttttttttttaagtcggagtttcgctcttgttgcccaggctggagtgcagtggctcaatctcggcttactgcaacctcagccttctggtttcaagcaattttcctgcctcagcctcccaagtagctgggagtacaggtacctgccaccatgcctggctaattttttgtatttttagtagagacagagtttcatcatgttggtcaggctggtctcgaactcctgagctcaagtgatcctcccatctcggcctcccaaagtgctgggattacaggcatgagccaccgcgcccggcctggtcaacccagttttaatatggccagagaccgtggggaggtcgtatagccttgacgcttggttcggcacggctggtgggcctgggcctttgttaggtgagtcttacacttgctgaggtgttgatgtgattgactgagccgtgcactgcagcagcactggcatgggtgaaaactgggttttgtgtttgtcctgggttgcaaacaagtgctgaaatagtggaaaccacggggcggaattcaagtctcctgagacaaggacgtctcctgctagccttttccaaacattgtttctcaaattgtgaattttgtgctctccttcaaaatctcctgggtggtgagggtacttagttaagttcaggttcctgggccatattccatgcccactgaattatcaaggggaggctgtgaaatgtcccttagcaagtattctgggcgatggctggcacggtgatgtaggcagatagccagtgatctatggggtctcgcagccctcttcctcctgatggttagggggctgtgagtcccaaggctcccttccgctctcccacgtccctctttaaccgtgactctgtggcttagggcacagcctctgtcaagagggcagtgcctgctgtggttgtgtgagaggctgttgaccccagctgtctagaggggcctcccgtggttgtgtgagagcctgttgaccctggctgtagaggggtcttttggagcaggggtgaaacctccagtgcactgagctgagaccccctggaagccgactctctgtgatgagtgagtgagtgagtgggtgagtgggtggttgcgtgtgtgtcattgtgagagcctggtgcttcaggggctgagggcgtttttgttgtttcctacacaggaagaattaggaaggactatttcccagctcgttcatgcttttcagaccacggaggcgcgtgagtatgctctgctgtagttgggtgcatttgtagatgtcagaacctctgagcatcagagccaccagacccaggaggtttgtgttctcaaatccagagtaaggaatgcctaagggcaagagagcgccagctggtgtctgtgggtgcttagcatgtgtgcagtgctggtgtaagtattcaacatggattagctcatttacccaaaaccctcatttcgagcctaatgggctaatatcttacactttaaaaataaagtgaaaagccaggataatgtcaccaagagattggactgaattccgcctgatggtcctgaggttcctgcagttgatttttctgactcctctgttctctggtgaccggagttgagaagttcttaccctgcctgtctgtaggactcacttgaggagcctctaaaaatcctcatgtccagatcctggtccagcaagatccagttctgggggtagggcctgggcatcagcattttttatctatagctatgtaaagaacgggttcctccatgttctcacctccctccccagagtggcttcgtgctcctcagtggttctcttctggcttattccttctccagagcacctgttccttcaggccttctggcagaccatgaatcgcgagtggacgggcattgacaggctgcgcctggataaattctacatggtgaggcagccaccagggtgccggcgggcgggggcagcgcgggtctcagtgcctggccaagcgagacaggcggcacctgggcagggaggcaacctgaggcagtgcgaccctgaagccaggggtgggaggtggagccgagactctgggcggtccctgaccagggctctgcagctttgtccagtctctgagggtcattgaatgggcaaggaattcgacccttaaaacaccacacaaacttttggttcagagaaggaaagtgacgattgctctcctggtgagagtcgatggtgacaccgttgttaccttgtcaaagaggcagagtgagtctggaggcgcagcagaggagctgcggtcacgccctagcatgagccctggagtgcttagcctgcgaggctgggatggatggtcacagtgtgggacttcctttccctcctccctcattgtatccccgttcagggcactgatttgccctgagaatacaggggaacactggggtttagaggtgcagcgtgttgctgcccggacctgcttctctccttccctccttccctcttgttgaaccatgaggtctcgttactaaggtggtggtcattgtaaccttagagcaggcctgagatacagggacattgtcactgtgtaggagtcggtcacccaatggggacactgaaaggggccatgtccgggtctcactgaggacagatgttgatctgccactctggcttcagtgtccagctcagattcgggccaggattgtgcagacagcatatataccagtgattctagaagtggagaccagggcgggaaaggcctggagctcaagaaggaaggaggctccagggcaggccaggggcccggccatgcactcagacagagtgcagactcttagggacaatggggctctgcagggaggccaccctactgttttgctgagatgtggctgctgggtccctggatggatgcgttctgctgctttccatggctcgtttctgggtgccccttgtgtggctgagtccagcagcacagccttgcgtcagggctagcctcggtggcaccgcagggtgttgtgggggataggcctcctgtgtctgcaagaacagtgtccgggctgctgggctgtgctctgtcatcggggctcctgggggtccgcgtgtcctctgctgctactgactgcagctcagaccccactctgggcgtgtgggcatgctgggtcagtagcctaaaggggggacaactgcagaagggtgttgagccccatggagggaaatggcattgttgattcacgggtgaggcttggcgggagggccttcgctgtgtagtggaccgcagaggaagtgagctacattctgcccgttgcggggggtttggtgaggaccagccgtgtttcagacctggttttgcggagggctccaccgcccgtgggggtagccgtgcctctttcctggttctcccttatgaatcggactgttccgtttcagccccggtttatggactggagtcgtaggactgtcccctattacccccgaccccccatgcacctgcttcctgccagctggggccttggagccggggatagggcatgttctcagcccagggttctgagggcttggtggtgtgtcctccagcgtctgtctgtcagcagctctgggggccggctgtgtgctggggccggcagaggtcaccacggccatgactttatcctgcagcggatggtggtacatggggatgggtggtctggcgaagtagggctgggcttctgctaatgccaacctccttctgtgtcaaagctcatgcggatggtcctgaacgagtccttgaaggttctgaagatgcaaggctgggaagaaaggtgggtgcgcggcgggcctgctctggggggacgctgttctcggggaccgcagtcgtgtttgtcatttgattctttgccataaggagatgtcagcctttatattaacgcatgcccccaatcgtgcttagagagaagatagtttttaaagtaaaaatcagtttgtgtgtttgtggaaatgatgccatttatcctcaggcttggaggccagttctcactgggagtcagaagggagttttttaatgaaagggtgtccagccgaggagcttcttataaaaacacggcatgttccgcttcattagcaatgctttttgtttttttgaaataggtgtcactgttgcctaggctggagtgcagtggcgtgatcttggctcaactacagccttgacctcccgggctcaagtgatcctcctgcctcagccgcccaactggctgggactgcagatgtgcaccaccaggcccacgtaatttttgtatctttttttggtagagacgagttctgtcctgttgcccaggcttgtctcaaactcttgggctcaaacaatctgcctgcctaggcctcccaagttgtaagcaatgttaattgctcctaattctaaaaatatgtaaattggctgggcgcggtggctcacatctgtaatcccagcactttgggaggccgaggcgggcagatcacaaggtcaagagatcgagaccatcctggccaccatggtgaaaccgtgtctctactaaaagtacaaaaattagataaatgcatagaaaagaattagcaggctggttatggtgggttaaggggatctcttgagcccaggagtttgaggctgcagtgatctgtgactgagccactgcactctagcctaggtgatagagtgagattctggttttttgttttttttttttaaagaatcagcaggaattgaactgtggctgctgagtttctctaggtttgagttgcatgggtgattttgcatttagggcagcggtgcctctggtttggagggattttcattcttctattccctggcaggactctgatgccaggagtctcattcattctgggccttagcattgtggattaccccataggggtctcatggcttaagctgaattaaatgttaaagggatgattttacttgtgttaactttttttggcatattattacaagagtacttttctccctgtaactgagaattcagcacaggaatcatgtggaagacctcggtgccttcccccaatgcctgctgcggtcccagtgctgacagtggggtccgctcttcccgccctcttggatctcctgcaggcataaccaggctgtcattaatatccacgccattgccactggcctgggaagtcggtcccttgcatctgtgtgtcttcctcttggtctcagcacctgttcttgcctctgtctcgtttttcctgagccttagagagcatcacttttcctttccatcacgagtgattctccagccttgctacggagcttcctaaggatcacacagtttacagatctgagttaggcagctgcgttattaagcaccccaggaggtccagatgcatgtaggtgctacacattattctctggggctgtctagtcttcagatccagggcctgtgatgccatcaaacccgcctgccagggagagctctggtggacgtcacagttggaatgcgtcgtgcggcagggcccaggaagccagcaggtggctcatggtcctcggcccctttctgggcctccaccttcctttctctgcctgtgctgtcctgacgtgtcttccccagcggtacccagtggaggcagtggagaggaacaccaggcagggcgtctcgtctcagccaagcctttctctctgctagcaatcttgaggacagagggaaggcctgtctgaatgtttacacgtgctgcattttgtagctgacatgcacactcaggccatacgttctggtggtggtgctggtcacataactccctaactgcaagactgccttgcgctggaggagacctaggatcgttgatatcatctgcgtggactttaaggctggcatgtttgcagacagtggcgcctgcccgcacttaggttcccatcagagcgtgtaaccatgggagagtggggggcacggctgtcttggggctcatcgaggctgcctgtcatgtttgctttttctttcctcagacagatcgaggagctgctagagctgctgatgactgagatcctgcaccccagcagccaggcccccaacggtgtgaagagccacttcatcgagatcttcctggaggagctgaccaaagtgggcgccgaggaggtgaggctgggctccgacggggcggtggagctgggcgtttgtggaggaggaactgagctcccgctggctttccccgtagcttacggcagaccagaacctgaagttcatcgaccccttctgcagaattgctgcccggaccaaggagtaagtggtgggtggcctgatcgggcccgactccttcactgagttcttccatggggctgctgttgtgggggtgctgctccctcgagggatgaatctgtctcagagtggccgctggccgtgtgggtggggagaggttgcaggggagtcggcggcttccgcttgggaatccagcataacgggcctgctcaccggcctctgctctgcccctcagttccttggttttgaacaacatcactcgaggcatctttgagacgattgtggagcaggccccgcttgccattgaagacctcctgaatgaactggacacacaggatgaggaggtggcgtcggacagtgatgagtcctctgagggtggtgagcgtggagacgcgctgtcccagaagaggtctgagaagccgcccgcaggtgggggtcacactgcgcctggcttctcctcggggcctgtcctgggctgagccagtgcgatctcctgctgggttgctcctgccacctcctacctggtccccttgtctctgcccctctccacagtccatcctcagcatagaagccagagtgacttctgtgggcaccaagcacacgtcgtttcccctcatcccccagcctctgatgtgctccacgccctctccggacccctgggctcctcggtctaacgcatgcctctggctcagttggccccctagactcgttcctgccttggtgccgagtctctccgtccctcccaccgtctctccccccatcactctctggggctggactctttcagcctcctggcctctcccagcccccaacgcagtcctccccatagcgtcactctgtggcacgggatgtgaatcacttgctcctcgtgttcctcgttcctggcccgtctccccagaggacagcaagctctgtccatattgaccatgactgggttcaggcctgagacctcagggcacctgactgctctgtgtgcagtgtgtgtgaggggcaggtgtactcacctgcccctcactgcctgccagaggcctctgtgggcagccgtggggtccagcctggcccattttttgttttgatgctgcactcattgtccgagcctgctgggtggtctgagctctaagtgtggcatcctggtgctgtggagggcatgtctttgaccacgctcaggaccccagtatgccccaaatcagtgctgtggccactgttccccttggcttcctaatcagaagaccccctccccaccgcccccagcacttggcccggccaccctgtatgcttctccctggtctctgccttgcccttctctctcagtagctgaggtgcctggcaggtccgctagtgcctgctgctggccccctgctgccagctacagagcagacccttgtcacatgctgccccacagctgcctgttgcccaaaaacctttcttctgcagacagtgccatcaaagccccaaatgcccagcctagctcgagcacccagccgaaacatcagctcccacagcttctggaccaggccaccctgaggctcctcacttccagaacttttgacatggcctttgttgcccaagatgccagcttgtagtcagccactcagggctgtgtaggcacctgtgccctgggacatctttttttcctttgcaggcctgaggtggcacctctcatcctgtccatacgagattagaggtcacatggcacctagtatctgccttgagctgtgggctttcccgcctgtgcccatgttctgaccagggtgcagggtgggctgtccgttcccgggtgtttcccgcctgtgcccgtgctccgaccagggtgcacggagcgggctctccattcctggatgtttggggccagcacacgttgggcacaggtagggttcacggggtcccttttgttccaggctccatctgcagggctgaacctgaggctggtgaggagcaggcaggtgacgacagggacagtggcggccccgttctccaggtgggttccctgggctcatggctgtgccctcagcctttgcccctctgtgctaccgcttgctctggaagaggaggggggcgttaggagggaggatggcagctgttggcatggagagttacccggacaggggttagctttgaaggagggatgggtgccccaaccctgcccgcctgtagacgagtgggatcattgagagtggggctggggcctgggaaagtggggctggggcctgggagggtgggctcaggcagaactgcattatccagggctggcctcacctcacgctgtcctcttgcctcacacatgggcagccccccagatttcctgcggccccctcgttggggtgctggtggggaatgagatggcatgtgccaagcggctggcctgtgggtcccagcgaggaatccactcagccagtggggtctgacttcaggcaaattggaaacttaaatgttttaagttttaaatatgattatctgcagactgaataaaatgtggctatcttgggttaaaattgatcaatttaacctatgttgttcgtgcttgtctgtgtggttcctagagtggtaaagctgcaggcaggctaccggcgggcgtgtgccctgcagtgtgccccgcagtgtgcatcttccagagtgtgccccgcagtgcgtgccccgcagtgcgcccgcagcttgtgtggtgcccgctgtgctgtagagtgggtggagctgcaggaccctcagtgagggtgggctgtgttcctgtgagccgggtggagaacctgcaagtgggaccaagtgctatctgggtctcaggggttccacgttctcggagcacgcagagcgtggctgaccttgcctctgtgacgtctctcttttgaaacagtttgactacgaggcagttgctaacagactgtttgaaatggccagccgccagagcaccccttctcagaacagaaagcgtctctacaaagtgatccggaagtgagtgtgtgagggcgctgcgtcctccctgctccccttggagttgccctttcttgctcagatctgggtgcctttgccttgtcctgggcccttccgcagcccccggggtgatccccgctaggaccctgagaccgtccccagcccctggggttcccctggctaggaacctgcagccgctctagctggagcttcctcctcctgcggaagccgcagctgtggtaagtgggtatctgtcttactctttcaggctgcaggacctggcaggaggtgaggatcggccgggcactgacagtggcaccaccttggaggtggagctccatcctcgtgggagtggtttggttctaggggtctcatagcacgtggagtctctttgcagagaggcctggtggtgtttctgagggacagggaggcagggcgcagggttccacagctctcgtttttgtggtttttgctgagtggttctcagacttgagtgtccattggagtgccccagagcctgagagatggggtgctggcctcaggggctcccaagcactgaccgcggtgctgctgctggtctgttgggcagcacacgtctgttcttggcagcgcgtggcggatggaactggcataggttatcggaaggacggtttcctagtgggcgtcgatggttagagacgtaggcgtttcccctggtgtttccttatgaaaagtttcagacctgcaactcagttggaaggattttatagtggatgtctgcgtgtccctgccggcctccagcatcagcacttcctgtccttgcgtgaagctcctctatcccagcatcacacccctgcatccgccagcgggcgcgtcatcagctgtagtccagggtttggtttttttattttttattttttgaggcggtgtctcgctctgttgcccaggatggcgtgcagtggtgtgatgcagctcactgcagcctcgatctcctggtctcaagcgatcctcccgcctcagcctcccagtcgctgggaccacaggcgcacgccaccacgccggctaattgttgtattttttgtagagacagggtttcgctgtgttgcccggctggtcgtctggggttttcgggacagcgcgcgtcagtgaggtgcgtgaggatcgtgtgcatctggcaggttttgatgcagaaagttgccttgggccgccagcatgagcattgtaggctgtagactttggtgtacaggttgagcgtctctaatctgaaaccccaaatccaaaatgccaccaagtccaaagctgagtgctgacaggaagctccagggaaatgctcgtcgcagtgttttctgtttggggttttcaggtgagggctgttgaactggtgaatatgatgcagacgttccaaaacaacctgacattcaaagcactgctggtcccaggcatttggggtcgtggacgctctatgctgtacctgtgtcctggatgctccaggaactggcttttccagatgggcttgggtctcagctggttcgtttcagctgtggcgggtactgaacacgctgctcctgggcattagaacagggcgctttctcacacacattgtcaggaggtggtgctggctggggcctgctggaagcagcgagcctcaaaccataagtccccagcccccgagagccccctgacttctgccctggttctcaggcattttccctgaagatgagatcccagagaaggcctgcaggcgcctgcttgaagggaggcggcagaagaagacgaagaagcagaagcgtctgctcaggttgcagcaggagagaggtaggactagggggtgtgttagtcatggagccggcgtcctcacctgcttgcttctcccctggatgggggtcacctgcagtgtctccccctgaagcatgagtgccgagtcccccatcctgggtgcctgctatccacgcatcccggaaatgccctgtcctcggcatccctcctgtaggcctctccctgcctcccccacccaccttccttgtctgcagctcccccgagctgtgtgcgctgccctccctcccggtctggagacatcctcctggctgggctgcctccttccgtgcctccgtcttagatccaagccccgtccgctcctctcccgcaccctccagagattcctgagtctctccacgtcttccttccccttcttccctccacttcttccctccacttctgtccttgatttctggggctgccttccgtgttgggcctctggccacacgagtgtggttggcatgtgatgccctcaccaggggcaaccctgggtccgcggcagaccactcagggcctggagctgcctacctgcagtggagggggttgagcacagtgccgggcagggcagggggcccatggcaagaatggggtgcagaggaggcacatggtggctttgccccacactgggaagccttccctgttactctctccatgctaaactggccccagggcctagggattcaccccttcccttgcccagagctccgtgccattgaagccgtccatctcatttcccatgaggcagtggcctcctctttgtagccggcccttggctgtgtgaaccctgtcggccctggcgttcaggacctggcactgcctggcgtcctgttcttccacctccccttctgccttgagcccagtcctgcctactcctctgtgcctttgctcctgggtctcatgaccctgtcctcacgctggtccttctgaggtcagcccttgctgaggtcctgagccgtgtggatggagcttggcgcccacactggacacgggatgcgtctggctggctgttgtggccgtgttgtcctcccaggtctgtggtgctggcatcctcagcctgagttggagtaagtggaaagagcccgtgttggcattctctggctcatggggtcttgctgttttgtcagggaaaggtgagaaggagcccccgagcccgggcatggagaggaagaggagcaggaggaggggtgtaggggccgaccccgaggcgcgggcagaggctggtgagcagccaggcacagctgagcgggccctgctccgagatcagcccaggggccgtggccagagaggggctcgccagagaaggaggacacctcggcccctgaccagtgcccgagcaaaggcggccaatgtccaggagccggagaagaagaagaaacgcagggagtgatgtggccgggccaaggacaggcagggagggaggccaggcctcgcttgcaccgcgggacgaggctgaccgggctgttctgtagactcaggaccgtggctccagaactcctgtgccaggcgggagggaagggcggcactggagagatgggcccatcattaggggccagcatcccaggaactggacctttccccagagcctccgcctgtggctgtgatgaccttgggccagaaggtcaaactccgaagactgaaactctgcctgcagcaggactggccgcccctgctgtggggggttcagaaaataaaatgccgcgcagcccttgccaggggaagtgtcgcttcaggtgtgtcctacggacgtgtgggaggtggcaggcgccagcctccgagcagtgtggtggtttatattcatgtttgtggaaaaatcttgcaagacatttctcctttcacagaactgcccaggtgttaacagggctgtctggacggggctcttttgcttccccctcaatctggggtctagagttgtgcaaggaattcagctccagtaaggcctggattgcccggggtgagcgtgtgtgtggtgggaagacctggcttccgcgagagccttgttcctggaggcaggagcgccccgccatcctgggtacccgcgggtccgcaggctgcgcacctctttccctcagccaggtcaccctcagcgtcctccctgcccctctccccttcacacctgctggagcctgtgagggaggtggcgggtccccactgtggcgacggagagctgacagtagcccagggctttccacctgcatggaacaagggcctgtctgccgccagcgctgtggccacagcctgcataggtgacaaggggccgctgcgttgggttttgcccgcatcttctgttccatgggtgcccagccagccaggccgtgtgggatccagcgagaggccagggcttggagtgggcctgggaccaggaaggacctctaggctgtggctggccttgtgcagaccctggactgcatccggttccccaaagccctgctgcattcgagtgtcccccaaccccgggcaggtggcacctggtgacacctccttcagtcccactcagctgggcggccggggcaggcttagggcacagttaggggccaaggagagggaaggccagggcccctgttctaggggttagggttctttccccaaaggaacttaaaaagacaagcgtggccaggcacagtggctcacacctgtaatcccagcactttgggaggccgaggtggccagatcacctgaggtcaggagtttgagaccagactgaccaacatggagaaaccccatctctactaaaatacaaaattagccaggcgtggtggcacatgcctgtaatcccagctactcgggaggctgaggcaggagaattgcttgaacctgggaggcagaggttgtggtgagctaagatcacgccattgcactccagcctgggcaacgagagggaaactctgtttcaaaaaaaaaaaaaaaaagacaagcgtgtctaacgtaaactgccggtggcgagcgtcaggtctgggcagtgtcccctgggcctggtcagtgttcccctgggcctggcctctttacccccagcagggcctgttgggacgagcccctgcagttggaggcctttggaagggaacggggtgcattataacgctttcttgtttttgaagtttctttggtcaaaagctaaggaaacaaccatgctaacagaagtttctggaaaaaagcaaattagagatgccgaattgcagttgtgaaactggaagccacagtgactttgcatcttctttcacatgtgtgttcacagggaggggtttttcatggctgcgccggcactgtcacgctctggctgtttccaggccctgctgggtgcacgtttccccatattcagaattgttttaaataaccgcattgtgcttatgacatgaatgactgaattcctctcctattggtagcctcttttacttttttatttttttatttttgagactgagttttgagttgagttttttttgagaccgagttgttttatttccgcacatgaatggtagttccagctactcaggaggccaaggtgggagaagcgcctgagcccaggagagaaccatcgagaggtaattcacatggagtacagttcgcccaactgaagtgtgtaattcgagttttcagcatattcaaagttgtacagccatcaccacagtcaactttagaccattttcagcccaaaagaaactgggccatcgcccctctgtctccccgccacctgcacgcatcctcccggcctcaggttccgggccgtgtctgttctggccatgtgttacgggatcacgcagcaccgtggttccagggctcatccacactggagtctttccttcatatggctgagtgacatcccacggtacagacagtgcattgcatctgcccgtttgtccactgatggacgtttggggtgtttccgcctttggccgtcttgagtcacgctgctgtgtaaggatgagtttgcaggggatggatgctttcattcctctggggcagatgcctaggagtgtcatggctgggttttgggctcaccatgtctagtcggttgaagaactactttccagacttttctacagtggctgcatgcgttgagttgagcctcggggatgggcccctgtctgggtgttctgctatggccaggctgatgggatcccaggaggtgactcttctcaggacacttggcccagccactctgactttgtgaccaggacgggaagcacctgtggttccactcgcctgcctgtggagtgggagtaacagcacagggctgggatgaggatgatgttgctttttcctggaaaaacaatctctcaaccttacagaaacattgcagacacacagcatttctcccccgagccttttgagagcatttcctgacttggtgccccagcaccctggatactttgtggcccatttcctcctacagagacattcccttaaccacagcacagtggtcacagagggagctagagccaggtgtggtggcatgtgtgtagtcccagctaccctggaggccaaggcgggaggatcgcttgggcccatgaatttgagtgagcctgggcaacatcaagaccccgtctcaaaccaggaaaaatcagggaattagcgtggatacctcactgtgtccaaccctcgaaccctcagtccttggttgtctcagtgaagtcgtttgcagccctagggccctgttcagattctctcatttctctgaagatctctagctcctgtgaggggagggtggtgtttagaagccgatctggctgggcccttgctattccgatctcattgttcacaggtgttctcagctggcagagctggggcagtgtgtgcacagcgcatgcctgttctctacctgtcccgccagccaccctccatctgtctagattaaggtcttcagaaaaaacagaaccaatgaatgggttttgtgtctgtccactccagctgcgagaacaaaatagtagggactgggcagcttaggcctgggagggtgagtttccgttctggaggattccgagggagtgtcggcagagttgcttttcctgggccccctccttggcttatcttaatcagtggccaccttctcacggtgtcctgaccatatttatttttttttggagaaaaagtgtcgctctgtcgcccaggctggagtgcaggggcaccatctcagctcactgcaatctccgcctcccaggttcaagcgattctcctgcctcagcccctgagtaactgggattacaggtgtgtgccaccacgcctggctaatttttgtatttttagtagagatggggtttcaccatgttgatcaggctggtcttgaactcctgacctcatgatcctcctgcctcagcctcccaaagtgctgggattacaggcgtgagccactgcgccgggccgtcctgacctcccttacaaggatgtcaggaaggttggactggggcccagccctgtgatctcatttaaccctggtcacctccttagaggccccatctccagtcacacggggagttagggcttcaacatgtgcttgtcaggggatacagtcctgtccatagcaggcgtgtgtgtgtggtggtggcggaggggagagtgccctgtttgttgtgaggagtcggctcacaggactggggctggcagttgggagttctgcagggcaggcggccggctggagaccccggaacgtcctcaggggcggggaccccggtcttttaagtccttgaccaggcagactggatgaggccccctctgcagaggcccacctgctttccttagtccaccgattcaaatcagcctcatcctggaaacaccctcaggaacatcggggcgctccacccgaagctgggtgccggggtctgctgcagcgttggccgctcactgtcttatcggctgcctatgcctgccccactcgtgttaggagttgacctctgggagaggcggtgcctccagctgtgatggacacccagggtgtattctagggtttcccttctgtgtttgaacctccctttgccgaaggaactctggcttacattacccccgatactcacttcatgcagaaccgaggcccggagtgggtgctgcgccccttcccgcgtgggtgccctcctcaccttcggctctgccacccccgcgggaaccctcctgcctggtcacctgctttcacacccagctgcgccacctcctgcagggcccccggttcctgtggggctctgacaccaggacacccgctcttcacccagcctgggccgccgtggccccccgcccctacggtgcagctctgcccttgttggccctgtctgaggctcccgagggagcttgagggagctcaggggtgcctggtgagcgggggtctcctggatgctcctcttccaagctcagaggctgacctggcaagtggcagcaccccacctccccatttgaagcccacaaggaggaagaaaagaaacttcttgactcacccatcacggagacccacggccatcccgagaggtgtggccacgtgagcaacaacgctccacgctgggtgtgggcgagggtcttccagggaccctaagccttcttaaagaacaacttggagatgtacttcatgcagcgttcagttccccgttgcgggtgcacagtcgggcggccgtgcactgcagcacagctcattgtagagcatctcagcgccccagagagcaagtcccgacgcagggccccctttacctggaggtgactccggggaggggcctgtggactcgcagggtggtgaggcgagtgtgtgcatgtacagcttcctcccgcagccaaacggtctagaacaaacatgctgtgtcctcgctgacttcagagcttcagtagcaacccacgccacagcttcacagttgacagttgtcacaggctctgctcggaggtgacgttctggggactgagcagcagctctggagttacagacttagaggggccgtctccgggcccccctgctttttcctcctcgcctcggtaccagtagatggagacgccagttgcagtcctgccagcccacagtggctcacgttccaaaggctcttccctgcaggctctcagccagcctgggtcactagaggtgcccattttcctgcctggcatggctgagcagagccaagaaacagccttgaaccccaagacctctccctcagccagaatgttctctgcgtgagcttctcatgctcaaatatgaccgtgacctgtaacatctcccggtaggccttgcgggaagtagaggcattgcacgggcgagggaggtaagcagggagcagcccccggcgagggtaggccctgcagctgcggcaggggtgaggggaggggctgagaggtggacggcaagtcaggcagcgccctgggtgttgtggggcggttcacgcaggggtgtgacctggccaggcaattttggacccacttcctggccgtgggatcgagggtgggtttggggacagttctgccagcagccccggggttggaacatgtctcacagaacttccactgttgcatatactgccttataaagatagaccggtaatggggactgtcccccctcattagcccggaagttcccccagagggcacaagaccccacgcggtgatgttgaggcctggacggtggtggtggatgaagaagaggcctggtttgcagtgtgtgtggtgctgtggcctaccaggaagagggcccaggagtgggcatgcatgtgcccagcccccagcccacgtggtagggagccggccccacagccatagcctggagtctgaaagggaacatctccatctctgatggggaccttttccccaaatggactcttctaccgtgaagagaacggcaatggccagcgccgcggtgagctgctcggagattatccccacaagcatcacttacctctacacagggctggttttacttcctgaaccggattcgccggaaggagctgcaggagactgcctcggagtcttcccgcagggaccatctccccagcgtgcggcctctcccctgtgtagcctctcccccatgtgacctctccccctgcggcctctcccccttgtgacctctcccctgcgtgtcctcccccatgtgacctctcccctgcgtggcctctcccccgcgtggcctctgccccatgtgacctctcccccctgcggcctctccccattgtgacctctcccctgcatggcctctcccttgtgtggcctctcccccatgtgacctctcccctgcgtggcctcccccatgtgacctctcccctgcgtggcctctcccccgcgtggcctctgccccatgtgacctctcaccccgcagcctctcccccttgtaacctctcccctgcatggcctctcccccgcgtggcttctcccccgtgtggcatcacccgtgggttctcattgcatggagccctggccccttactgtgggtgaggagtagggggaggattggccgttgggttctgggttccgcagtccaccgagggcagtctggccctctctgtgcctcccccagggatgttgccggccctttgtccccttctgtcacgtcccctgtcacctgccctctaggacctgcatggctgcagtcccaccagctgcctctggggggtgcccatggccctggaatgggcttgggggagaacgcgccgccccggggcctccaaccctttgctccaggccacttgctccaccctctcttgctgccccgtgtgacccaggatctgtttgggcgagtgcctcgttctctccctgagtggagcttctgcaggtgcttcacgaaggctggcacccacctctacctgtgtaccacggcctgggatggaccctgcagctgtggccctcctggcactatccctaccctgtgccctggtgggtgtgcagtgggaacaggcaccctggggtccttggaggctcagcctcctcagccctcacccccgagaccccatcgtggcgcctgtgtccactcagggattatcccaagcctggccagaggtcgggaggggacagagggagccacataggagcctctaccagcccctttcttaccacggggtgggggcgcttccctcccacagggtctcaggcttgtgggctccccccagctgcccaggccccagagggcacttctgacccttctctttggggtctgccctggggggctccaggccacttgctccaccccatccctcttctggagcctcccagcacctcagttccgactgtggggaaaacagaaccctaggaagcaacctcacggctgtgggcaggggagggcggccgggagccccagctgccccacagggacattgagtgaaggcagagcctgggagggaagtcagatccgtgcatgggtcccttcctgttggtgttggcgtccctgagtgagcagccatccgccgccccctggaaagagacctggagaagcagcttcaagctttggagcccagcccagctgctagcagcccctgggtcacagtgcgaagggggaaggcaggggcttgaggaagaaagtgagaggattgtgcctgggggcccctggagggccagtctggaggcgcgttggggtgaggcggtgctggctgtgcccgtctgagatgggcagagggaaggcgcccagggctgagcccagggtccccaggccagtccctcactgctctggggttcagtttcctcacctgcacaaagggcgggtcccgtgctctccggaggccacacggggtctccctgaggcactgagtctggcttgtttctggaaactgaggcacaggaggacgttgataaccggccttcctctgttctctttcccaggggtgcagctcgtccgtcccatggtttcagatttgcccggtgtgttgcaaccaccacctggcactcagcttgcccggtgccgcctggccccgcagcctttcccaggccttgcaagggtggcacagatggggaaactccatctgcaggggcgtcacccccgagggatgtgtcctccacactcccttgatggtcacgtgggtcccgggagggcgcgtgtgactcttcccaggattgcagcgttggggcgttgtgccagcctggccccgtgggtgcggagtgccgtggacccctcggccctcctgaccttgtttccctttgatgtagaagtctgcatggcatgaattccagtgacaatgggccgggccaggctccctgtgcccctggtaccgctgcccagggccggtctctgcagtcaccctccttccttcctggtggctcctccctccctcctttgttcttctttcttttcctgcctaaatgtttatcgagtccctcctgcattaagtacccgtgctgtgcaacaaattaccttgaacttggtgacttcaccaccactgcatgtcagcgcccagccgtagacgagggtttgggaggcatggctgggcctgcccagggctccctggctgaagtgggtgctgaagctgccaggcactggaggctgggcctctcgcacactccctggctgttgggagggtgcattcttctttcttccttgtcttctagaggatgcactcttggctgtaggcctcccgtttctctcacgggctattcctggggttccctcagatcctggaggtgcccacagcccccttccccgaggctcccccccccacacactttgcttcttcagtgccagcaggagaaattctccctcatcagcttcctcagagaagggctcacctggtcaggtcaggccccgcactcgggcaggcacagcagggcgcaccccatgacgcacccagaacccgcccccacagccccggagtcctggccgctgtccccagccctacgcccctctcagagcttgagccaggggcagcgcaatgggcagctccttccctctcctgtccctggaaaactgctctgggtgatttggcggagagtgagaggattcgaaaacgctggtacgtggcaggggctggcagattccaaaagtggccccagactccctggacacccagaccatccacctggtgccacagtacctgattcccatggccagggcattggggagccaggcaggggcaggggaggggcgttccaggtcctccctccttgccttgacctacatcccaggtgacccagcgaggcccaggcccccgcccagtctgccccgcctcacagtcaggcttcatcctcatccccagcagcccctgggccccccatgtcaccctcagggcacttgagggcagggtcaggccagaccaagtgtggggcctggccaggagcaggtggtgccggggaatgagtatagggcttatggtgccgtggcctgtctgctgcctggtctgtcctaaggccagtggccctgtccctaggctgtggggcacaggtcccattccccgggggagtgaagggctcaggcagcaggcagccccgtcccctcccctagggtgtgcctgggtgactcctgggctggccgactgggagctagcctgagtgtaggttttgagtctgagcaccaggtcctcaccctgcccctggcaccccttgggcacctcctggcaccctgtctgctttgtgccacttgccctggggtctgtccctcccttggacagacaacagtgtcctactttttttttttttttttgagagagagagtctcgctctgtcgcccaggctggagtgcaatggcatgatctcggctcactgcaacctccacctcctgggttcaagcgattctcctgcctcagcctcctgagtagctgggattacaggcacacgccaccatgcccagctaatttttatatttttagtagagacggtttcaccacgttggccaggctggtctccaactcctgacctcatgatctgcccgccttggcctcccaaagtgctgggactacaggcgtgagccactgcgcccgacccataatgtcctactcttgcctgaaggctctgagccgttcgggtctcctggacacggagaagccacagcccagtgccacctgtccttttctctccgctgctcacaggggccgaggtctgcacacccatggctgccccaggctgcccgccaggagctgccttttccctggccaggctgtttctcagccctgcggttcccaaggaaacgggcttccaggcaagcccgggtggagttcacttttctcccaattggaattcggctgaattgaatccagcctctgctcccctcacctccgcatcctgaatttctgctcccagctccctcggcctgggtcaggttgggtgggtggtgacaccgtattctggcccttggggtttaggtcagaggtgctggggcctgtgtggggtgatcatggcactctgcggagagggagggagccaggccaggaggtcggcttggctggagacagcctggtcccactgggagccctggagcacctggagttgggctggctggggcaggaaggttgtcttttgggcacccctccaacccgtcaatcagccgtgggctgcccttccattgagatgtggggaaaaccttgatgaggtttgttcaaggtgaatgttcgtgaggtgtgagccactgcgcctggcacatgatgtcctactcctgcctctcgcctcaggcaagggtccgcaacagccgggctcagcctctgttttggagggaggaaggaaggaagcaggaagactacctgaagcccccagtaagtgcagtggagaagatagagcaaggtgaagggttggccgtgtggagggcgagtgtgcggtcaggggagggcttctttgggcaaatatttgacagaggcaaagccgggagccaagtggatatttggggcagagtggggttggcggcaggagtagccagtgccaaggccctgcaggggtgcacgggtgtgtagaccggtgagagggcgtggcagcaggggaaaggggggtgggcgggggggagggggggcgaccggtgagagggcgtggctgcaggggaaaggtgggtgggcggggcgggaggcgaccggtgagagggcgtggctgcaggggaaaggtgggtgggcggggcgggaggcggccggtgagggggcgtggctgcaggggaaaggggggtgggcggggcaggggggcggcggggagaacaagtggccccatcctttgaggccgctgtgtgagtctgctctggtggccgtgacaaaggaccacaggctggggcttcagcaacccacatagattctcccacagtcccggaggctggggcccgaggccagggtgcagtggggctggctcctgaggcctctctcctgggctggcacctggcgcctcctccccgtgtcctcacagggccgttttcctgtgtgtctgtgtcctcattgcctcttataaaaacacaggtaggttgggtggggtccacccaaatagccttattttaacttaaaaaacttttcatgttctggcttctcaattatttttttttaattaaggtatttgtgacacttaaagatcatatatttaagatacaatttgctgatttacaatctaattttaatctaatctcctctcttaagaccctacctccaaatacagtcacagctgggatcctgggggagttaagactcccacgttcggatttttgagggacacagtttggcccgtgacagtcccttgctgtctgagggacacagttcggcccgtgacagtctctgctgtctgagggacaccgaccccctgtgcgtttcctgtctccagctgcctgtgtcggtcacacatgttattctcacgcgctggccctggtcacctggtcccctccgcaccctgggcacatgccggccttggtcaccaggtcccttccgcaccctgggccgtgccgcacttgggtggcattttgggtggagcagccccggcccctgcctccctctcctgctgagggttaacggggcctgatctctgggtgagctgctgtgccctgtgcacttccgcctccaggaccctcagccaccaccagggcacagcccagctcagccaggtggtgaacggacacaggagctactggggagatttggccccaggtcaggtcctggccttgggcgtgtggcccttgtggggccagaaaacctgtccctaccgcccagcaggtgctaggggatgacatagcccctcctggacataggccctcctgccactctccccctgaccaggaagtcacccccaactgcccctctgacactttccctgtgagaggcaaccaggcaccccacaaagcctgctgtgggttctcccagacccaggctggagggactgacccatcagccacctcccctccacccctccccaacccccctggccccagacagcctctgtccacgaggggtgtgcccccggagctggccacagccccagcagggacggcagctctgtggggctggtggggggtgcctctgcagggcacaggtggacaagaggcctctcctgcatggcctgcaggaggcccagcctaggaggagggctgagggcaccaaacgaggcaaagcctgggggaccatggttggggtggccaaggaaagaaggggggcagcagagagcgccatctgctgcaggctgagctcaggacggaggtctgggcacacttggcttggggcaggtggccgccttgtgtgggtcgaggaggtgcaacctgacctgtgacccagtccctggttctgaggtcacagcgaggccactggagacctcaactggccgggccgttcgccgtgcagggtggctgcagagacccgctcagcaggtgcccactgtcacccggccggaaccagcaggcaggcgtggcaggacagaccacagggaggatgctggaggggccagggaagcacatttagcacacttggggctgcctgtggtctgacgccccagagggtgacacctttcgaggctcgaaggcagctcagggcagctcctcccacacaaaggcctcctctgggctgtgagggtcagtgtttctcctggggcccagccctggggcctctttgcatgccctctgggtgccggctcaggagggcactggccccaggcctggctccgccccagaaaccgggtggctgtgtgttagctgggcagtggcttctgaggggctgtaccaggaggctcagtgggcatccccagggcttctcctcagtgctgtggtcccaccctagactgggtagccagcctggcgccctcctcccacatagtgtcacagacaggcccaccgaccctgtgggcttggggtgggacagccaggatcccagtctcggcaaggcctggtacggtgggcgtctcagctgcagccagcattgtgtccgccccctccgcgaggcagtgtgtttgtgatcagagcaggagtgtagcctgctggtttcggtacacgtagaatgcgtgccagtgcacgctagcagcatctgttgtgttccttgtgcggcagctccatgccatggccaaggtctcagtctctgtcctgctgattgctggagcaggtgtggtggcccatgtccgaggacggctgtgtcctggagaggtgggcaggggctgggttcatctgcctctggagcctgctggcagcctcctcccgggtttcatggctggcaatcatgaaagctgcctcgatggtggcggggccctgttgatgtcagattggcgtggcctcctgagagttcctcctgtgggtgtgcgcagggcttgcatgtgcaggaaatggactcaccctggagctgggcccccaggggctgccccgggcctgggtgggggccgtgcccttgtctgtccgtctctctgtcagtctggcttcttcctctccaactctacctcttttggggtctcctttctgctctgtgtcaccccggatagcttctccagtgtggaagctttaactttctgttgtgtgtgttttttgtttttgtttttgttttttttttagatagggtctttctccattgcccaggctggagtgcagtggcgcaatctcagcttactgcagcctcaacctcctggactcaagcgattctccagccttagcctcctgagtagctaggattacaggtgcacactgcaatgcccagctaattaaaaccttttttttttttttttttgtagagattgtggtctcacaatgttgcctaggctggtctcaaactcctgagcttatgtgatcctcctgccttggcctcccaaagtgctgagattccaggtgcacacaaacgcacacaagcacacatatgcacatagacacacaagcagatgcagacacacacagacacatacatgcatgcaaacacacatacacgtgcacacactcatacacaagtccacacaggcacttcctgtgatctccaagcctgaggctttatgcttggtgggtggggtctgcctccaccctctgtccagaccaaggaccccctcagcctgcagagcagtgctgcagcttcgggaatgtgctgtgtgagctcccttctgtcttagaccccctcttccctctgagctctgcggttggaaggtggaacttctcctcctcctattttcctccccaacattcactgccttgtcttttgttctgctttctgggagatgttcttgaatgtccgaacttcctcctgcattttaaatttctgccctcccaggtttcatttccaagagctcatttctgctctctgcttgttctttttttacagcttcctgttcctgtttcatgagtgcaatgtctttttttcttcatctttcctgctgtggtggggttttccagcaggaaaactcagagctgggtgggagggctctgccatggttcgtgagtttgctcccctttccccatgggctgtgttggttgaaaagaactctctccctcccccaactcctcgtcaaattcaaatgctcacagggtctccaatattcagcgacctttcatggattaaattctgagccattcttttgcccctagaaggttgtcctctatagaatagcgtaaaactgttaggagattgttagaacaaagtcttgcaggcaccttcacttggcagaagaatcgatcaaactccatttagaagggagctcattgaaggggccttggtttcccgtttcctttgtaaccaagacagttctttccagagggagtagatttggcttgaccctgcatctcagcccaggttcccagtggccacatgccaacatttgatgggggtggggaggtgcagtcccaggggagagaggaggggggggtggggagaaggggagggagggagagcaggctgtggctctgcagtcctgagctggcctcagccttcagagaggacagtggacatcctggagaggccacggggagccactgcatcctggaagagttgagtgtggtagcctgagccctggccttgattctgcgacctcgggtgtgaactcaccaggtagaagacggggacgctggcagggacgcagaccgtgcctgagccggccttcctgtgtgggcccagataccggctcaggtcccacctcccctggtgctgtccacaccaggacagcagaagcctcatgcctggtccccagggatacggttctgaatcaaaacctctcacggcacatcgaattgagcctgaccaacgcctgggtcctggcagtggaggctgggaggagagtgtctgggattctgtccggggaggcagggctgtcactgtggggagctatgaacatggatggggcttgctgaagagactcaagcagctcgggggtcagaacagctccgagaaccacgtcctcctcccactttgggatctgggccaagtctccctgcctgtctgggccttggttccctcctctgtaagtgtgtggaggacaaggtgacctctaagacctgtccagttctggggtcccacccctgaggactttgcagcctgggctggcagccctgaatgatacgggggacacctgcaggggccgcacccctgcatagactgcagttaattctgggttaagcaaagcctgtgtttcccacacgggcccagcttctgatgtctggaaagatgaggacccgcacttgcttccatcagcagcatgtcctgtgcacacgaaggttgcaccgtcctaaaaacaccactgcgatgacgatctgagcttttaagtgtctcctgctgtctgcagcacgttgagcagaacaccctccaaattccaccttatttggaataagggtctttgcaggtgtaattaattgagagtctgtgatcatcctggttttagggtgggccctaaatccaatgactggtgtccttatgagaagaggagaggccacagagggacacatggagaaggccatggacggcagaggcaggggtcaaggtgacacagccacagccgagggacgcctagagtcacccgaagcggggaggggcaggaaggatcctccttggagccttcggaaggagcggggccctgcccacaccttggtttcagccttctggacatcagaacttcgagggaatccttttctgttacttcgagccaccaggtttgtgtaattcgctactacggcagtcacaggaactcaggcaccatttctctttttttttttttttgacatggactctcactctgtcaccaggctggagtgcagtggcgccatctcagctcactgcaacctctgcctcccgggttcaagcgattctcccgtctcagcctcctgagtagctggggctacagccgcgcgcctccctgccagctaatttttgtatttttagcggagaccgggtttcaccatgttggccaggatggtctcgatctcttgacctcgtgatccgcccgccttggcctcccaaagtgctgggattacaagcgtgacccatcactcccggcctctctttttgaaaagaagtgaccaacacattttatgagataatgtaatctcaacatcaaaaaaatgaggacattacaagaaaggataattactggccaatcttaattattagaaaaatacttttcaaaacagcaaagaaaatattagcaaaattaatcaagtaatggattttgtcccaggaactcaggtttagtaaaacattacaaaaggtacccagataatgcaccagtctcaccagttaaaggagaaaagacatgtgcctgtatccgctggttcatagctgatattcaataaaattcaacaaagcaatgacctcaacaggagaaagattttcttccaaaaatctacagaaaatgcttgatgaaaaaaaaaaaaaaagaattttttttttaagtgatggggtcctctccctctccctctccctctccctctccctctccctctccctctccctctccacggtctccctctctctccacggtctccgtctgatgctgagcccaggctggactgtactgccgccatctcggctcactgcaacctccctgcctgattctcctgcctcagcctgccgagtgcctgggattgcaggcgcgcgccgccacgcctgactggttttcgtattttttggtggagacagggtttcgccgtgttggccgggctggtctccagctcctgaccgcaagtgatctgcctgcctcggcctccggaggtgccgggattgcagacggagtctcgctcactcagtgctcaatgttgcccaggctggagtgcagtggcgtgatctcggctcgctacaacctccacctcccagccacctgccttggccttccaaagtgctgagattgtagcctctgcctggccgccaccctgtctgggaagtgaggagcgtctctgcctggccgtccatcgtctgggatgtgaggagcccctctgcccggccgcccagtctgggaagtgaggagcgcctcttcccggccgccatcccgtctaggaagtgagaagtgtctctgcccggccgcccatcgtctgggatgtggggagcgcctctgccccaccgccctgtctgggatgtggggagcgcctctgcccggctgcgaccccgtctgggaactgaagagtgtctctgcccgactgccaccccgtctgggaggtgaggagtgtctatgcccggccgccccgtctgagaagtgaggagcccctccgcctggcagctgccccgtctgggaagtgaggagcccctccgcccggcagccgccccgtccaggaggtggggggcagcccccgcccggccagccgccccatacgggaggtggggggtgcctctgcctggccgccccgtctgggaagtgaggagcccctctgcccgaccaccaccccgtctgggaggtgtacccaacagctcattgagaaggggccatgatgacgatggcggttttgtcgaaaagaaaagggggaaatatggggaaaagaaagagaaatcagattgttactgtgtctgtgtagaaagaagtagacataggagactccattttgttctgtactaagaaaaattattctgccttgggatgctgttaatctatgaccttacccccaaccccgtgctctctgaaacatgtgctgtgtccactcagggttaaatggattaagggcggtgcaagatgtgctttgttaaacagatgcttgaaggcagcatgctccttaagagtcatcaccactccctaatctcaagtacccagggacacaaacactgcggaaggccgcagggtcctctgcctaggaaaaccagagacctctgttcacatgtttatctgctgaccttccctccactattgtcctatgaccctgccaaatccccgtctccgagaaacacccaagaatgatcaataaatactaaaaaaaaataaaaaaataaaaaaaagaaaatgaaggatggagccatgagctgaggaatgtaggcagcctctagaatatagaaaaagcaatgaaactgattctgtcctatagcctccagaaggaacataaccctattgacaccctgatttcagcccagtagttgtgattttggatttctcacctccagaactataagataataaattcatgttgttttaagctaaaaaaaaaaaaagagatggggtcttgcgccgggcgtggtggctcacgcctgtaatgccagcacttcgggaggccaaggcgggcggatcacgaggtcaggagattgagaccatcctggctaacacggtgaaaccccgtctccattaaacatacaaaaaattagccgggcgtggtagcaggcgcctgtagtcccagctactcgggaggctgaggcaggagaatggtgtgaacccgggaggcagagcttgcagtaagccgagattgcaccactgcactccagcctgggcaacagagcgagactccatctcaaaaaaaaaaaaaaaaaagatggggtcttgctatgttgcccaggctgaactcaaactcctgagctcaagtgatcctccagcctcagcttccgagtagctgggatcacaggcgtgggcccccgtgcccggctcagaggggcttcttgtaagttaggagcaagtccaggccttccctccagatgtggttgagctggagctcggacccactgccccacgggaccccggcctcagacccaggtggctttggctactcatcttcaaggccccaaagctcctatttctgctcctttttatttatttacttatttttttgagacaggatgtcactctgtggcccaggctggagtgcagtggtgcgattatagctcactgcagcctcgacctcccgggctcaggtgatcctcccgcctcagcctcccgagcagctgggaccccaggcgcagccacagtataccggcctctgctctcttccatacaagatggaagcagccgggagtgacacctgcccaagtcctcgtaggtctcctcaggtcctgttgggtcgtcagggctgaggtcggctgagggttgggtgttcacaggctgattttaggctgggcctgctgaccacagggcctgggagtgaaccccatgtccccgaggcctcttccctggtctccatcctatcctcaggtaaccttggcctctgcttcatcttggataaactgtggccccacagaggcctcagaaagcaaaaccctgcccctgggaggttctcgtcccatttcagctccttttctaattcggtggtgagacagcaaagctgagcctagagtggctgtgcagacaggcccccagccaaaggccctgggtcttccagcagctttcgttgtcaccgggacctggcctgctcccaaggttcccgagagcagtggggctgtcccccacacccaggtcccatcagcgaggctgggggctcctctcccctcgctgatggacggggaagccaggctcgctttccttccgggtcctcgattctcgctggatcaacagtgtcacaagtcagactccttaaaactgctttccaagggaacccaaaatatctgtttctagaagtgttggcattgaagagctggagatgactcacagcccagccagtgtctcctcttccacacccacactgctgggtctatttctagacagcttggttgtgtgtggagttcagggaacctggatcttccagcatcttgtcttaactggaacgttccatcagtggttctgtccagagtatctagcgagctgtttacagccactcccctgaagctcagaggcaatgatgagccctcccagtgatcaaagacaaagtcacttatgttccacatcattgccccttgcattgataggtgtttaagtgcatcctggaggttttctgaggcaggcagttggcgtatggaagtggtcatcatggaagtcacactcgtgtttgtgctgctttcaggaggccttcgtcccaagccctgcaccccaccctggccataatgcttagtgtcacccccatccctggggcaggaagccaagggccagagtagcccctgcctgtgagcagtgaggggctgtccagtgctttcattcaatccatcccagttttctcgtcaacaaagtgaggatgagaatgcctcagaatcacaatgcttacctttcagggttgttttgaggagtaagagatgacacacgagcagggtgcacacagcaggcactccatgtgtgcagggatcagcgtgcacacagcaggcactccatgtgtgcaggtccctcctcctcctggatgtttatcaagcgcctccctgacagtgccccgtgttcgctgcaggcgccgtgcccaatggggagaggcccctggatcgagtccgggtgggtgcggctccacctcttccagctccagaccaggaagagcctctcaagctgcttttcagggccatgtggaacggaggctggtgccactgtctgatggctcaatggctgcagaccatcggctatgtctaaatccataaaagtcctaaatgagctaacaaaccattcatgagatcttttccatcctcctactggacacgcgtatttccacgaagacccggaaggcccgttagaactcggaaacgggctgctctaggttgggttctggaagatggcgtcaggagctccggcctcagccccagcctgcagcctcctcttcctagccaggaccctccggcaccaccacagccctcagcaaatagctgtccttggctgcccctcgggcctggggtggtccccttggaggaaggacctgggagaggctcatgcagaccccagaggccggctggggtctttgggcagagaaatctctgtctggggccctggaatgtggtctagaaggtgagggtgggggcctctgggcggaagttccctgggccctgcgaccgccctgccctccgggatgggggtccctctcacgtgtcctctcacagcctgggtctccaggccccgccatggggagatcagcttggcaaaggcacacccagcgctgcacctcctggcccccggagcttcacctggaggttagggcagaactttgtccatcaggaactgggggttcagccgtctccacccctccccatcctgccctgggagcagctgtccccaggctcaggggctcctttggcctcttggcagggttctcaggggcaccagcagtgagctgcccgcagtacccagtggtgcccagcagggaggtggcccctgccacccactggcttacttggccacagtgagatgtccccatgcaggatcccgcactagctcggcttgctgagaacccggccaaggcaggtatcaaatacggtaacccgagaagagaggaatttcgacagccccgtacacaaggagagcatgatccagcacccggcgccaggtctgctctgacggcacggccagaacagcgggtcccgcacgttcccgctcatggaaatccagcgcccagcgccacatctctgactgcagggccaggacggtgggtcccgcacgttcccgctcatgtggaaaggctacaccacttagtagaagagggttttatcacagaagctagtgctaaggggactgcagcgtgaccgccatccctcatcttgtttgctcactgtgtgcgccagcacagaccctgccgacccgctgtggacacactgaggaaggggcgtggggaggccggaggagacaggagccctcccaccacgcccctcccctggcacagggctgcatttgccctcagcctccaacttagggctgcacagaggggcagaactgggggtgctgaggtccaggattgggaggggcttaaagcctgagaggagaagagaaggagaagcagcaaattagcacaaggtggcccaggaaggggaccaggaagtgaccgtgtgaggtggccgtgtccacccactgctagggtcagatccctgggccggatcctgagctgccctctggagaaggcagccctccaggcctaggcatccctgggcttccccagggcgagcagaagcagctgggaagcctgtcccacgggagggacatcacagggcccttaagccgagagagatgcatctgggtgtggggggtatggggtggggtctcggttgagcagcagttcagggagggccgcagcaagctcagccggcaccagctacgcgggaggctgagacagaaagaatgagtcgctggaacctgggaggcagaggctgcagtgagccaagatcgcgtcattgcactccagcctgggcgacagaacagttctccgtctcaaaaaaaaaaaaaaaattttacagtgattggctgggtgcggtgactcatgcctgtaatcccagcactttgggaggctaaggcgggcagatcgcttgatcccaggagttcgagactagcctgggcatcatagcaagaccccatctctaccaaaaaaaaaaaaaaaatacaaaaattaggcaggtgtggtggcattcatctgtggtctcagctactctagaggcttaggtgtaaggatggcttgagcctgggaggcagaggttgcagtgagctgagatagtaccactgcactccagcctgggcacgacagagtcagaccctgtctcaatttaaaacattattaaaaacaaaacaaaaaaatacagtgatgaccgggcgtggtggctcacgcctgtaatcccagcactttgggaggctgaggtgggcagatcatttgaggtcaagagttcgagaacagcctggccaatgtggtgaaaccccgtctctactaaaaatacaaaaattagctgggtgtggtggctcatgcctataatcccagctacttgggaggctgaggcaggcagatcatttgagcccagtggttcaagaccagcctgggccaacagcaagacctcaactctacaaaaaatataaaaattaggccaggtgctgtggctggctgggcatggtggctcacacctgtaatcccagcacattgggaggccgaagtgggtggatcagctgaagtcaggcactcaagaccagcctggccaacatggtgaaaccccgtctctactaaaaatacaaaaattagctgggcgtggtggcgcatacctgtaatcccagctactcgggaggcggaggctggagtctcccttgaacctgggaagtggaggttgcggtgagccgagatgaaaccactacactccagagagtgtgactctgtctcaaaaaaagaacaaaagaaaggacacagcaagaaccataaaagaaaattggatatattggacttcatcaaaattgaaaagttctgcttattaagagacatcattacaaaataaatagacaagccatagactgagagaaaaatatttgtaaactacacatttgtcaataaaaagaaaaacaaggcaactaaaaatgggcaaacaatctgaacaggcacgtcacgaaagatggcacacagatggccaataagcacgcgaaacagtgcttgacatcatcagacactgaggaaataaaagttaaaaccacatgagatatgtcatcagaaaggctaaagctaaaatgatggggtgtttagctgtggtggaggcccctggaatccctgctgcacactgcaggtgggtgtgtaaatggtacaatccctttgatacaagatctggcaatttcttataaagctaaatatacaactaccctataacctagcaactgctctactgaatttttatggagagatggggcatggtggcgtgtgcctgtaatcccaggcttgaggcaggagaatcacttgaacccaggaggtggaggttgcagtgagccgagatcacaccagcctgggtgaaagagcaagaccttgtctcaaaaaacaaagaaaccacaaacaacgcccccccccacccccaaaacacctgtactcaagtgtcaagatttgataaaactgatacttccaggccatcaagcacgtcaggtgtttggtgatgaaggatccgatgtccattagtagagcttggggccatggccttgatttgtgctaagacaccagcagtttaaaagcacactgtggtaaaatacacatttaccatcctgcccatgtttaggggtcccattcggtggcactaagagcacccacattgctgtgcaacttcaccaccccggagctgcttcagctttccaaactggaactccgtccccatgaaacactccctccccaccccccgccagcacctacgcttcacctgctgtctgtgtgggtcagactcctctagggacctaagtggggtcacacagcatttggctctcgtgcctggcttctttgagcgtaatgtccccacatgtcagaattgccggcacccccggctttacctgccattgcttctgtaccatcgacagtgcaaatgtgagtcccataacaaaacatctcgaggaacatctcagtcttgccatgaaaatagttcggatctcccagaccccccagggcatcagatgagtccacacaggagaaccccacaccccgtggcctctacccgcagacacaactgaggttatcaccacacttctactcaaacgggaacattctccacaaagccacagtgctggcgccacactgaggaaattcacagcagtgtctttctgttggagcccaatatccagtccacactcaggctcccagctgagccagcgtgtcacacgcggtgttcttccaaaccagcgccaagactcacgctctccttggccgcgggtttcttgtccctgttgtggcagaagcccccagccctccccacttttcctcctccgtgacagtttgaggacactgactcggaagagaaggcacacccagggcacagccctccccagtgctcctgaaacaggcagtgctgtctacagcaggcgtctcggcagcgtggagacagaagtcacctggctgccggcttccatctcggatttggtgctgctttgggtgatggacgtggagagggaaccccagtgtcagcggtgcctgtgaccctcaggcaacgtgaaacgcagctgcttccacatgccaggaaggctgttagaaaatcctgcatgtctgccgggcgtggtggctcacacctgtaattccagcactttgggaggctgaggcgggcagatcacaaggtcaggagatcgagaccatcctggctaacacagtgaaaccttgtctctactaaaaacacaaaaaattagccgggcgtggtcgtgggcgcctgtagtactggctactcgggaggctgaggcaggagaatggtgtgaacccgggaggcggagcttgcagtgagccgagatggcgccactgcactccagcctgggcgacagagagaaactctgtctcaaaaaaaagaaagaaagaaagaaagaaaaccccgcttgtcactgccgtcgccgccaggagtcactcagtggtcattggactgtgccccagcggtgggatcagcttcccatgggtggccgccggcaccaggctggttggtcaccgcaaacccacactgccttcccacgccagctcaggagccgacgttgcttctcggtgtcctcagccacagcccttgttcatcagacacgaagggagctcaccaaggaccacccaatggtgcagagttcttatccagccacataacggccttcacacagctgcccttcaggaaacaatatttaactctaacctgcctatgtgtgcatgcactgtcttgttattaaatgcgccaacatattactttaatatttcgataactttttcactttaattggttttctttgcaatcagatgtgttttatcttacggatttgtcaacatcatttgagaagaagtccataggctcagcagatttttatgccaggtgggccatggcataaaaatgtgaagaatgtgctcacttagacaatacgtgtgctaaaattggaacaatacagagaagattagcaaattaaaacaatgttaggaagtcagtgtggtgaggtacggtgcctcatgcctgtaatcccagcactttgggaggccgagatggaaggactgcttgagaccaagaggttgtgaccagcctggacaacagaggagaccctgtctctgctaaaaataaaaaattagctgggtgtggtggtgcatgcctgcagttccagctacttaggaggctgaggtgggaggatcgcttgagcccaggaatttgaggctgcagtgagttatgaccgcaccactgcactccagcctgggcgacagagcgagaccctgtctcaaaaaacaaacacaaaacaaaccccaacaaccttggtctggaggatccatccaggtcaaaacgtgtgcagggtcctgtggaggatctgggggttcacgctgccctcatgtgaggccacggtgtggatcatcccatgggtggggacaccaaatggaccgcttggtgggggtggtgaccttgagagctctcttttgtgagggtccttggcagtgagcaagtcgccggctcagcagcaccacagacgcggctttcccacacacccccagggtttcggcagccagtgttcacccctgcctgaatcagccgttccccgagggggctggtgtctggagacgttctcagtcggctgttcctgccacacttcttagctgacattttctgtaaggagaagctgttcctcattaactagaaaaggccggtgactggtgatcactttcctttcaaagccaatcttcagagggagggattcgcaggatgtcatctctgggtgacaaatgacatttgctttcttccccctcgctctctctttggtgtcactgtggacttacagatattttctttttttttttgaggtggagtctcactctgtcgcccaggctggagtgcagtggcgcaatctcggctcactgcaacctttgccttccaggttcaagagattatcctgcctcagcctcccgagtagctgagattacaggcacctgtcacctcgcctggctaatttttgtatttttattagagatggggtttcaccatgttggccgggctggttttgaactcctaacctcagatgatccacccaccttggcctcccaaagtgctgagattacaggctcgagccagatttttatttagtactagtttacgatcaaaataatcgattgctctttttaatgttccaaatgacccacacttggccagtgggagcccctggcggcccagctgtccaccctgccggacgtgggtaagtgtcctcacctctggcatgaccaggtgccaggcacactaggacctcaactgccccaccctggagctagccccttctccgaagagagtgtcccaccaacctgagtggcagggcgtgaaagcatggccctcctgcaggcacagaacgcagcctccctctgcctcaagctgtcctgtgtggccgtttccctctctctcatcgacccttccaggcccaggattttcggggggcctagagcgtacgcgctttccatttttaaggcttcttttcccatatgctgcatgaggtgccctcctcggacatccaaggccctgccaagggtttccaacacgtgtccatgacaaaacaccaggtccttctcctcccctcaccctgtgcccccacaagtccatcagtaagtcatgctagccccacctggacgatgtttccagcatctgacctgccctccaggctgccctcacccaggcctgcatgctccctgcgcccccatccccagtgcacatggctccctgtagccctgtgactttgcagataaggctatgtctctgagtccctcgtcaccaatgaggcagctgtgggcaacggggaaggcaggcaacttggcctcccgagcaggtgacatgtgaggttggcagcagctcccagggagtcaccgcggcagggactcccaaggttcctgagagtgcttgagagctgtcacctcgctcctggccttccttagggtcctgtccagcagctgcgagaggctttgagcacctgcgtctgaacccttctcctcggaacacctggagtggcttccactctctgggccagatctgactgatagccccagacagcccttccctgcacagggtcaggggcagtggagatgaccccttcccggggcctccctgtgactggcaggaaatgtcagcgaccaccggccaccttcccacttgactcataccttagttttccatcatgactgtttcaatggtgatttataaatatcagatgccaggttgtttttttttcttttcgagatggagtcttgctctgtcgtcagactggcgtgcagtggcaccatgttggctcactgcaacctccaactccctggttcaagctattctcctgcctcagcctcctgagtagctgggattacaggcacacgccaccacgtctagctaatttttgtatttttagtagagatggggtttcaccgtgttggccaggatggtctcgatctcctgacctcgtgatctgcccgtctcggcttcccaaagtgctgggattacaggcatgagccaccacgcctggccagatgccagattgtttttttaaaaaagcgtgtgacagttcctcaaaagcttaaacatatgaaacatggagttgtcatgtgacacagcaattccgctcctaggacagacccagaatactgaaatcagggactcaaagagatgcttgccccaagaggcttagagtggcactcacaatgccaaaagctggaatcaatccagggttccttgacaaacaaatgggcaaacttagagtggcacccggcctgctgaacatattttggctcctgtgcgggctgcatcttttgtcagtgggtgtctatcacccatataatctctggcactgcactccagcctgggcgatagagcaaggctccatctcaaaacaaacaaacaaacaaacaaactagaaaaggtgccaaaaaagaaacagtgccaagaagaggaaggagcgatggaattgctgtggtaggcccttagacacaagtgatgggcagtgatcttgtttcagggtggaacatgctgcgttgaagatgtgcattgtatcacttggcagacagggagaggagggaaagcaatttgagctcagcaagctcgtccccaccgtggacactggctgggctagaggagaggagcctgcagagggcccattgggtctggggttggggaggtgtctctactgggtgcaccccccatttcacttccttccttctgccaggctgggggtccacatactgtgctgattttcgaggccaccctcagcattccgttcggcgataggccgagatgtctaagcgggccagcgcctccccgccctgcagaggagcctgcgtacacccaggaacgcccgtcacctccccgccctgcaggggagcctgtgtacacccaggagcacccatcgcctcgcagcctgcttgggggctgtctggtgccatcgtctacggtggcattgggttcttggggcacagcaggagggtctcagagctcagagcctgtgtctgctggggctgcgtctctcaaggcgcccatagcggtcagcccttcctgttgcggcttccatgtggccaggccgagtctccaacgtctcattcagaggagggattggtgcagccgccgcgctcacaatcttgcccctcaatgagcagctttggtgaatcatctctgaaaagactgaattttgctgaattatttaaagcaagcgcatccatgagaaggaactgcttgctggggcctcaggcctcgctgtgagctgttcaccaggagggagctggctgggcagggggtatgaaggccgcaggtgtgaaggtagagtcattaccaggcaggggcagtgtgacccagctgggcagagagcgctggcctgtctcagaggtgagctcacaggtctggaaatggtctgaatagaaaggattggtctccggaggaaagcatactcttcctattaccagaaccctgtggggtttttattgatatttcactggattacaaatgttgaaaatgttgcaaaatgaacatcctggtaactcaagtatttcatggaccctcacaaacctctgcggacgctgttggactggaccccaaaccacaacggggccctggtagaggaactgcaggaaaagcaggtttcctataaggaaagacaagaggaagctcattctccacacccagaccactgggcgtggtgtttggggagccctttggggagctgtaacggggcgtggagaccttctccattgcgcccccgaccagggccgggcctggctgtgactccggggcgggcagtgatgccatctgtcttctgcagaggagaacgctgggaccccctggagcacctttcaagaacgactccaaagccggatatttgcagtgggaggagaggaagggagtgcccggctgtgtcttcttcatccccctgaacacaggagggggcagcctggctgaaggcctgacccctggggggaaagcgcacctggtgaaaaactgttctctgactgatgtgatgatgaaaacgaatggcaggtccttctcataccgcaacgtggaaagaaggccctggaagcgccactgcttggctccagcgccccagctcattcggagcaagctgtggcccacagggagcccctggaggatctgctggcttccttaacgaagcaatgctctgagcgccagggtggggacggggtctccctcagcatcttcaggaaggaaacaagcagtgcctttccctgtgggccaagttccaggccctacccctccctgaagggcaaggggcattgggggacaagagatggacctcctggggacacatcctttcccaggccagcctgagctccagagtttgattttattaagggagtcagaagggggcccgtacagacagaccttcgtgggaccactatggcccagacaccatggccacagtccaccaccaagaagagggcaggatcaggaggcacagggactcaagccctccagacgcagcagtcccggccatctcctcaccctggtccctcaccccagccccacaggatgaccatcactggccacacacagctgaggagctaggaccccacctgggccaaaccctgacgggggtggcggtcaccagacatcaacatgagagggagatggggagagagagaaagaggcagtggggaggagagagaggatatcttggaatttaatactattcaatgttcaaaaaccaagcatcagggatagacactttcagaatgtcagagtagggcccctccaaatctgtttctccataaaagcaatgagaatactggcaaaaattataaaagtgaactctttcagaactctggaaattcaccaaagggttgcaaccctctgaggagcatctctactaaaaaatacaacaaattagccaggcgtggtggcgggcacctgtagtcccagctactccggaggctgaggcaggagaatggtgtgaacccgggaggcagagcttaagccaagattgtgccgctgcactccagcctgggcaacagagcgagactccatctcaaaacaaacaaacaaacaaacaaacaaaaaaaccgctgaatctcattggaacaatgagtgttgggtcattttagctgtcactgtttctattcccactacccctgcagtagccttgaaaaccagcatcctcgtacccactggccgactagggtgggtttggagctcccagaagccccatcccctgataattgtcactatttgacccatctggcagcgtcctagaaacactcccccgcaccccgccccaccaccaccctttgcagggcttgtctttattgacctgactcagaccttacttactaggaacagctttttccctgggatgattgttgagaaccatccgtggaaactgcttaacatcatacctgcctagctggtgttaccagtaggggcaaacaagaagaccaaaaccttaaaaggaaaagctggggaatgggatgtccacagggggtctgaaaggctgacatgttcctgggaatctagaaattagaaatcactaatagaagaaaatttgggaaattcacaaatatgtggaagtaacatactcctgaatcaccaatgaatcaaagaggaaatcacaaaataaattagaaaacactttgagatgaatgaaaataaaaccacaacatatcaaaatttatgcaatacagaaatgaagtggttggaggaaaatttatagctgtaaacacctgcattaataaagaaaaaggaaaaacagtgagataccactacatgtccattagaatggggaaaagccaaagcactgacaacaccaaatgctggtgaggacgtggggccacaggaacgcccattcattgctggtgggaatgcaaaatggtgcagccacttgggaagacagtttggcagcttcttacaaaagtaaacacgctctttccgtaggacccggcaatcacactcttcagtatttacccaaatgagctgaaaacttatatccacacaaaaacctgcacacaggactggatgtagtggctcacacctgtaatctcagcacattgggaggccaaggtgggaggatcgcttgagcccaggagttcaagaccagtctgggcaacaaaatgagatcccatctctacaaaaatttttaaaaattatccaagtgtggtgacacacacctgtagtcccagctactcaggaggttgaggtgggagaatggcttgagtccaggagttcaaggctacagtgagctatgatcacaccactgcatgccagcctgggtgacagagaaagaccctgtctcaaaaaaaacaaaaccaaaccaaaaaaccaaccaaccaaaaacctacacctggatatttatagcagctttactcataatttccaaaatttggaagcaaccaagatgtccttctgtatgtgaatggataaataaacagcgatgcatccagacagtgggctattattcagcactaagaagaaatgagttgtcaactgtgaagagatacggaggaacttcagatgtgtattgccaggtggaagaagccagcctgaaaatcctacctactgggcgattctgtatgggaggaaaaaccttatctctaccctcttggggtcttcggctgagtctaagaatcaaattgacctaagtcaggttaacaggagaaaagcagggccgggcgcagtggctcatgcctgtaatcccagcactttgggaggctgaggtgggcagatcacttgaagtcaggagttcaagaccagcctggccaatatggtgactctctgtctctactaaaaatacaaaaattagccaggcatggtggcgggcgcctgtcgtcccagcaggagaatcacttgaacccgggaggcaaaggttgcagtaagcggagattgcgccactgcactccagcctggcgacagaatgagactccatctcaaaaaaaaaccaaaccaaaccaaaccaaaacaaaaaaattacaggagaaaagcagacagattttgttttacaggtacatggaagtccccacaagaagatgaagacccaaagacatggccaggcctaaatgtctgtagattaggctgagcaaagagaggaaattgtggaaaagtcactaaaatatgtgaggcgaccaaaggaagacaagaattattgtaacaagatctgtttgtacagatttctctctgcctggaatccccatctctggtgataaaaatgtttctttcctcctggtatagggaactgggctctcgtatgggaatttaatctcctactttcaggaagaaaagcggggggtctaagcgtacttcttgcagctacttttatttttagtgcctttagctaaaataattcttatgccatagtggcaggtttttggctggtatattcccttcaattctgactatatgatgtctggaaaagacaaaactatgaagacagtaaaaagatcagtgtttgccggggtagggggaaggagggatgagtaagcagagcacaggggacttttagggccatgaaacactctgcgtgacactgtaatgatggatccacgccaggtgcatgtgtgaaaacccacagaatgtacaccaccaataggctgggcgcggcggctcacgccggtaatcccagctctgtgggaggctgggcggatcacctgaggtcaggagttcgagaccagcctggccaagagggtgaaaaccccatctctactgaaaatacgaaaattaattaggcatggttgtgggcatctgtaatcccagccacttggaaggctgaggctggagaatcacttgaacacgggaggtggaggttgcagtgagccgagatcacaccactgcactccagcctgggtgacagagtgagattccatctcaaataataataataataataataataacaacaatgctgctaaggacagtagtgtcgtgtatgagtttctgtgggaacacgttttcatttctttttttttgtttttttttgagacggagtcttgctctgtcgcccaggctggagtgcagtggtgcaatctcggctcactgcaagctctgcctcccgggttcatgccattctcctgcctcagcctcctgagtagctgggactacaggcgcccgccaccacgcctggctaattttttgtatttttagtagagacggggtttcactgtgttaggatggtctcgatctcctgacctcgtgatccgcccacctcggccttccaaagtgctgggattacaggcgtgagccaccgcgcctggcccacacgttttcattctttgggggccttaccgaggagtggaactgttggtcatacagcacctctatgttgaacttttgaagaggctgctgccctgcttacggacgtggttgtaccatggtgcattcctatcagcgtccccttcaaggctctctgttgcctgcctgttttactataaccgtctgagtgggtgtgaagtgataattcatggtagttttcatttgcgtttccttaaggttactggtgttgaacgttttttcatgtgctaatcggccactcgtagatcttctttggagagatgtgtcttcaacctctttgctcgttttttattcagaatatttgtctttttatttattgttaagataatattctggatatcagtcccttactagacgtatgatttgcaaatattttcttcattactataggttgtcttttcagatttgtttgtttgtttttgtttttcctttttagagacatggtctgtctctgtcacccaggctggagttcagtggcatgatcatagctcactgcaccctcaaactcctgggctcaactgatcctcccacctcagcttcctgagtagctgagactacaggtgcatgccaccatgctgagctgattttaaatttttttgtgtggagatggggtcttgctatgatgcccaggctggtcttaaactcttgtcctcaagccatcctcctgcctcggtcccccaaactgctggaattataggcatgagccaacatgcccagctctcttcattttttttttttttttgagacagagttttgcttaaagatcttggctcactgcaccctccacctcccaggttcaagtgattctccggcctcaggctcccgagtagctgggattataggtgcgtgccaccatgcccaactaattttgtatttttagtagagacgggatttcaccatgttggccaggctgatctcaaacttctgacctcaggtgatccacccaccttggcctcccaaactgctgggattacaggcgtgagccactgcgcctggcctctcttcacttttttgatggtgttctttgaagcacaaaagtttaaacttttaaaaatttacaaatcggccagtcgcagtggctcatgcctgtaatcccagcactttaggaggccgaggtgggagaatcactttaggccatgagttcgagaccagtctggcccacacagcgaaaacccatctctcccaaaaatacaaaaattagccaggagtggtggcgcgtgcctgtagtcccagctattcgggaggctgaagcaggagaattgcttgaacccggaaagtggaggttgcagtgagtcgaggtcacgccattgcactccagcctgggtcacagagtgaaagttttaactttgatggagtccaatctgtctattttttttctttggttgcgtgtgcttttggtgtcatatctaagaagccattgcctaatccagcgtcaccgagatttatgcctgtgttttcttctaaaagtctcatagttttagtcttatacttaggtctttgatttaagctaaatattgtacatggtgtgagataagggtctaactttattattttggatgtggctattaagctgtcccagcaccatctgttgaaaagactattctttcctgattgagtgtatttatttatttatttatttatttatatatttttgaggcagagtcttgttctgttgcccaggctggagtgcagtggcacgatcttggctcactgcaagctccgcctccctggttcacgccattctcctgcctcagcctcccgagtagctgggactacacgtgcccgccaccatgcctggctaattttttgtattttcagtagagacggggtttccccttgttagccaggatggtctcgatatcctgacctcgtgatccacccacctcggcctcccaaagtgctgggattacacgtgtgagccaccgcgcccgccccaattgagtgtttttggaatgctgttttgaaaatcgattgaccatgtatgtaagggtttattcttgaactcttcattctacctcattgatctctatgtccatccttatgcccagtcccccaactttcttctttttcaagactggttattctggatcttttgtattttcatataaaatttaaggcaagcttttcaattttttttttttttttttttaaaagcagctgggattttgataggaattgagttgaatctgcagatcaacctggaaagtattgccatcttagtaagtattcccatcaatacttaggaaagtattgccatcaatagtaagtcttctgatctataaacatgggatatgtttccattgacttaggtctttaaaaatgttctttcaggccgggcatgttggctcatgcctgtaatcccagcactttaggaggccgaggtgagcagatcacttgaggtcaggagtttgagaccagcctggctaacatggtgaaaccccatctctactaaaaatacaaaaaatagccaggtgtggtggcaaatgcctgtaatcccagctacatggaaggctgaggcaggagaattgcttgaacccgggaggtggaatctgcagtgagccgagattgcgccactgcacttcagcctgggtgacagagcgagactttgtctcaggaaaaaaaaaaaaagttctttcagttatattttgtagttttcagtgtgcagatcttgcacatcttttgttaaatttattcctaagtattttaatctttgtgatgctattgtgaacggtttccttaatttgactttctgattgttcattactatttgtagaaatgcaacatatttttgtatattgattgtgtttcctgcagccttgctaaattcatttattcatcctaatatttgttgatttttttttgtgtgtgtgtgtgtgtgtgtgtgtgtgtgtgtgatccttatgattttccatatataagaccatgtcatctgtgaataaagatagtgttacttcctttttaatccagatgccttttatttcttttccttgcttggttgttctggtttgtctctagtagaatgttgaacagaagtggtaacaacagagatccttgtcttattcctaatcttgaggggaaagcatttagtctttcattattaagtatgatgttagctggatttcataagtacccgttttcacttcaggttcactttcagtttcaggttgaagaagcttccttctatttctagtttttttttgttttaccatgaaaggatgttaaattttgtcaaatgcttatttatttatttatttatttattttttaagatggagttttgctcttgttgcccaggctggagtgcaatggcgtgatctcagctcaccgcaacctccacctcctgggttcaaatgattctcctgcctcagcctcttgagtagctgggattacaggcatgcgccaccatgcccagctaattttttgtatttttaatagagatggggtttctccatgttgatcaggctggtctcgaactcccaacctcaggcgatacgcccacctcggcctcccaaagtgctgggattacaggcgtgagccaccgtgcccggaattttttttttttttttgagtcggagcctcactttgtcgcctccttctgatgcctgtaatctcaggccctggagtgcagtggtgcgatctcggctcactgtagcctccacctcccgggttcaagtgattctcgtgcatcaacctcccaagtagctgggattacaggcacgcacaccaccacgcccaactaatttttgtatttttagtagagacagggttttgccatgttggccaggctggtctccaacttctggcctcaagcaattcacccactttggcctcctaaagtggagggattacaggggtaagccatcgcgcctggccaatttttaaatttttgggtagagacagggtctcactatgttgccaggctgttcttgaactcctgggctcaagcgatcctccagcatcagcctcccaaagcaccgggattacgctgtgaactgccatgcccagccctggattttcatatcttgagtcaacttggcattcttggaataaatcccacttagttgtggtgtataattctttctgtactttactggatctgatttgctagtgttttgtggagaatttttgtatctatattcatgacagatgctggtttgtatgtttttttttttttttcttttttcttgtgatgtctttgcttggatttagcttcgggatagaactagcctcctataatgagttgggagtgttctctaattttctattttttggaaaaatttgtggaggattggtattaattctttcttaagtgtttggtagaaattaccaatatagttatcttggccttggttttttttttttttgtatgtagtttttaaaaaatattactaattcaattcctttacttgttacaaatcgattaagattttctattatttcttgagtcaatgtggtagtttgtatctttttaggaatttgtctatttcatctaagttatataatttgttggcatacaattatttatcttattttcttataatacttttacttctgtaatgtcagtagtaggccgggtatggtggctcatgcctgtaatctcagcactttgggaggccaaggagggcagatcacctgaggtcaggagttcgagaccagcctggccaacatagcaaaaccccgtctccactaaaaatacaaaaattagctgggtgtggtggcgcacacctgtaatcccagctacttgggaggccgaggcaggagaattacttgaacctgggaggcagaggttgcagtgagccaagatggcgccattgcactccagcctgggcaacagagcgagactccgtctcaaaaaaaaaaaagtcattatcaatgtcccccctttgattccttattttagtaacatgaatcttctttcttttattcttggttagtcttactaaaggtttatcaattttgttgatcttttcaaaggaccaactttcagttttgttgattttctcttgtttttctattctttatttcattcatttccacactaaattttaatatttccttccttccactttgggtctagttcgctcttttattcccttgtttcttaagatgaaagtttatggttttgctttgagatctttcttctttcacaaaaatacactttattttttggagcagttttaggttcacagcaaaattaagtgaaaagcacagagttctcatatgtcccctccctccacactgagccttccccaccaccaacatcccgacccccaacatttccaccagagggcttcctttgccgtagtggtgaacctgcactggcccagcaccatcgttttttgttgttgttgtttggagatggagtctcgctctgtctcccaggctggagtgcaatggcacgatctcagctcactgcaacctctgccttccaggttcaagtgattctcctgcctcagcctcctgagtagctgggattacaggcacaagccaccacacccggctaatttttgtatttttagtagaggccgggtttccttcccgaaggatgctaaagaaagacccatcctgcagctctgtccttacagaaggacatcgaggaattacccactggggagctctgtccttcccgaaggacgctgaagaattaacctcaggtcttcaagagggaacccgtctaacaaccatcgaggaaccaaggcctcccagcaaccacgtgcgtgagcttggcatgcgtcctccctgttggggccttcaggggacagcagccctagcccagccaacagcctgatgcagcctcacaagagaccctgagccaggatctcccaccacgcagctcccccgctcttgactcacagagactgcgctgacgacgtttgctggtttcagcttctcagttttggagtaatttgtaacacagcaatgggtaataaatacagagggaggagagaacacagacctgtggaattaccgtacacactttctgagggtccctaagcatcagagatataaatcaaaggcctaccgtccactttcacccaatatgaaattgcagtaaaaagtggtataaagagataaaatgcacacatctgccacaggggttccgaggacaagctggtggccaggggaaccggggagggagcctgtgttcctagctcaggagtgtttttcgagcacacatctctgaactggattctgaaacatggtgggatgttgagatgcagatggaaagtctttccaaatgccaaggtcaccacaagccaaggccaaccaaggatcagattgggtatattcttaagaatgggctgggcgcagtggctcacgcctgtaatcccaatgctttggggggccaaggcgggtggatcacttgagtccaggagtttgagaccagcctggacaatatggtgaaatcccatctccactaaaaatacaaaaaaattagttggatgtggtggcatggctgtaatcccagctacccaagaggctgaggtgggaggatcacctaagctagggaaatagaggctatagtgagccgtgattgtgccaccgtactccaacctgggcgacaggagtaaaaccctgtctcaaaaaaaaaaaaaaaatggctggtaatttaacaaagacatgtgcccactctctttaagcattgtttcagcagcctcaacctccctcgcttaagagatcttcccagctcagcctcctgagagtagttggaactataggcccggaccaccatgtccagctaattttttaagttttttatagagatggggtctcgctatgttgcccaggctgatcttgaactcctggcctcacgtgattctcctgtcttggccacatcgtcgggattacaggtgtgagtcactgcatatggttgggctaagccatgtttcttaaacttaattgtttctttgccacctttattaatattttttcttttgctaggcccattttaaagttaaggaatgctttttaatacaagtatcctatatatcttaatttgtttaatttttaagttgatgggctagctttttaaaatgttagttttgccctaaagaataatatccatctaaccattcatatttgttccaataaagataaaatgaacctgcctgacgcggtggcactcacctgtaatccaagagctttgggaggccgaggcgggtggatcacctgaggtcaggagttcgagaccagcctggccaacatggagaaaccctgtctctactaaaaatacaaaaattagccaggtgtggtggtgcacaactatagtcccagctgcttgggaggctgaggcaggagaattgcttgagcccgagaggcggaggttgcagtgagcggagatcgcaccattgcactccagcctggcggacagagacagactccatctcaaaataaataaataagtaaataaataaatattttaaaagcctgcagatttcagtcctaaactctctgcccaagcagtttgactcagagggaaaatgtcgcctctgttatgttctctcacattgcacggcttgggcttccatctggttcggttgtgtggtcaggaacgtacaagtcagtctctgccgctgttttctttcccacctgcaagttgagagtgctgagactgccctcttagccttggggtattaaagagaccagacagggaaggggcccagcgcagcgcccaggacagaacatgtgctcggcacttaaccgctgctgctaccagcgggatcgtccttgagagcggtagaatccaatttagggacaggattagacagagtgtgggctttgacttgcaccctctacaagagtgtggggaggggacagaggccagatggccccaggcagggacgatgtggcagcattgctgtgtccccgtggcctggtcctgcatttgccgcccgcgtcctctctgcctgaatcctgttcctagtgcctggtcgtccctcagagctctgctgcgttccacctgttcaccagacatcctgggctccagtttccatctgcccttgtgctgctctgtcatggcattttgtatccttttatgatagtcttgacgactgtgcacgtacccgacagggctcggccctctgggggggtagacggacgccacactgaatccatctcttgcccgagatggtaggatcctgtctaaagctgatgaggaggttgggggtgggaagaacatggctggaagagcgtccggagcccacccctgttatggagcgatagaagccccccctttctgtggcccccaccccacctttatcctctctaatgcaaaactgtaaagcagttagggtaatttagtccagcaggttctgaagtctcacccagttagatgctccctacagtgtattccgtaaaatcacaattctcagggccatgattcaagcagccgcccagtggagttgggctaaacagacacctctggtttcattatttatttatttatttatttatttatttatttatttatagacggtgtctcgctctgttgcccaggctggagtgcagtggcatgatctcggctctctgtaacctccttctcccaggctcaagagattctcctgcctcagcctcccgagtagctgggattacaggcatgcaccacgcccagctagtttttgtatttttagtagagacagggtttcaccatgttggccaggctggtcttgaactcctgacctcaagtgatctgcctacctcagcctcccagagtactgggattacaggtgtgagccaccacacctggctcatttctttttacatcaacactgaggcaacttgaaatacatccattcatctcagctgtaaaatagcggaatatttctttattcctgggaacataaggtattagttgtatcttcatcagcaattttggaaggagggcatgttgaggcctctgtcagtgtgagctggcagagacagggcaattagttgatgtagcagttacctatggctgtgtaacaaaccaccccaaaaccgaatggcttagaggaaccattatttagctcatgattctatgggctacaggtgtgaggcacggcacctcgccctgcattctagcgggatcagctgggctccgctaggcagttcttcctctggttttgtctgaagtcagctggaggccggtggcctcactctcgtgcccggtggctggctggcagtcacctggtcacagggtaggctgtgcctctcgtcacccagcaggttagcctaggcttgttcacagggcgggataacagggtttccaggactagcaagaaaacaagccccaatatgcaagtgcttttaaagctacttctttctttttaaaaacaatttatgtacttatttatttattattattttatttttgagatagagtttcgctcttgttgcccaggctggagtgcaatggcgcaatctcagctcactgcaacctctgcttcctgggttcaagcgattctcctgcctcagcctctggagtagctgggattacaggcgcctatggttatttcttgatcatgtactaaacaaggagtggattattcacacgttttccagggaaaagggcaggcaacgctggaactgagggttcctcttcctttcagaccatgtagggtaacctctggaccttgctgtggcatttgtaaactgtcatggtgctggtgggagtgtctttcattataatatattagtgtctaatgtattataattagtgtataatgagcaatggggatgactggaggtgactttcattgccatcttggttttgatgggttttggcgggtgcctttagtgtatcctgttttatcagcagggtctttgtgacctgtgtcttgtgataccagtcctgttgacctcctatctcgtcctgtggctaagaatgcctggcctcctgggaatgcagcagcccagcaggtctcagcctcgttttacccagccccgattcaagatggagttgctctggttcaaatgcctctgacagtaggaggagctgaagattattggggctattagtgcaatggaccatagctgggaaatggcagggccggggggctgtggagctgacatctgagtgtggggtgcagttatctggaaggctgcttttgaggaaaggtgttaggagtgcccccactaggacacctgatggggacgagaccacaggaggatggcaggaacacggctgcaggagcttcagccaaggagggaacaggaactccagcaggcgctggagccctgtgccctgtccagcatcctggaacaggcgtagcaaggaaggaagggtgtggcaggggttgaggtgccgcccagcgcaccagggtttggaagggcacgcccgcctgtttgggagcagacacttcagaggcactcaataaacactagtccctgttttattgactaatgatagtcaatgtgaaaggaaaataagccttgggaccccaaaattactaagttatttatactgaagggaaaaatcaagcagggaactgcttagggccaacctgcctcccattctattcaaagtcatccctccgctcactgagataaatgcatatctgattgcttcctttggaaggctgatcagaaactcaaaagaatgcaaccattggctggcgcggtggctcacgcctgtaatcccagcactttgggaggccgaggcaggcggatcacttgaggtcaggagttcgagaccagcctggccaacatggtgaaaccccatctctactaaaaatacaaaaattagtcgggtgtgatggctcacacctgtaatcccagctactcaggaggctgaggcaggagaatcacttgaacccaggaggcagaagttgcagtaagctgagaccacaccactgtactccaccctgggtaacagagggagactgcctcaaaaaataaataaataaataaccagaatgcaaccattggtctcttatctactatgacctggaagactcttccccacttcaagttgccctctttccagaccaaaccaatgtcctctgtattagtccattttcacattgctatgaagacatcatacccaagactgggtcatttagaaagaaaagagatttaattgactcatagttttgcagcgctggggagctctcaggaaacttacaaattgtggtagaaggggaagtggcatgtcttacatggtggcaggcgagagagtggtgagtgaagggggaaaagcccttgataaaactatcagatctcatgagaacccccctcactatcacaaggacagcagggtggaaccccgggacccagtcacctcccaccaggtctcgacctaaacgtgtggggatgtggggattgccattcaagatgagatttgggtggggacacaaagccaaaccattcgagatgagatttgggtggggacacaaagctcaaccctatcaacatcttacatatattgatcgatgtctcgtgcctccctaaaatgtataaaaccaagctgtgtgctgagcaccttgggcagaggtcgccaggccctcctgaggctgtgtcacagatgtgcacctttaactttggaaaaaataaacttcctaaattgagacttgtctcagatatttggggttcatatcatagaccagggcaaatgcctagtcatgagcctgggtacatggaaagagatggggacaggccactcatgagcaaagccagctggggccccacaagcatgggaagggagtgaggccccacctcatgagcagactctgcactcacccatccaggggggctgttggaggtgcaggcagttggtattggcagccgggccacaggggaatcgtgcacatctgaactgaaccctcctcctcaggacagacatttttaaatttcacttaaaccacgacctcttcattatataggttataaaataaactgttgccgggtttgctgtgaaatggcttgcctctcagcaggctgcctgctgtgtgtattaatcagagttcaattacagaccgtctggtgtttgtgcgtgtcccagctgggctggtgcatgctgtgacaattgtccacgcctggggatctgtctactgaatccccaaggagaaagcttccttcgtggatggcaggaccgtttccacgcacacagccctggtcgggggagctggagtttgcctaggtccctccgtagtcacagtgataggtgcccaggcccctccgcagtcacagtgataggtgccaggtccctccgcagtcacagtgataggtgcccagttccctccgcagtcacagtgataggtgccaggtccctcagtcacagtgataggtgccaggtccctctgcagtcacagtgatgggtgccaggcccctccgcagtcaccgtgataggtgcccagttcccacctcagtcacagtgataggtgcccaggcccctccgtggtcagagtgacaggtgctaggtccctctgcagtcacagtgataggtgctaggtccctccgcagtcacagtgataggtgctaggtccctccgcagtcacagtgataggtgcccaggcccttccgcagtcacagtgataggtgctaggtccctccgcagtcacagtgataggtgctaggtccctccgcagtcacagtgataggtgcccagttccctccgcagtcacagtgatgggtgccaggtccctccgcagtcacagtgacaggtgcttcatatttgtatctcattttatcctcatgacaactctgctgtcaattctgattctgaggtcaaacaaggctgggaagctgggtgacctggcagggacctggccattgcagggagggggctgcggacggagccagaggcttccaaagagacgggaaagcatccagtttgcagaccaggaatcagtacatctggaaccgtgaggcaaggaggagcttcgagatcatccagggggacctcctacctgccggggacttccactcctattccctcccaagcagctctctgctcacagtctctgtgtaagcaacggtccctgacagcttcaacttggggagggcaggggaaggatgagctgcctctcctatttaattttaatttaaatttttttttgaggagtttcgctcttgttgcccaggctggagtgcaatggtgcgatctcggctcaccgcaacctccgactcctgggttcaagtgattctcctgcctcagcctcccaagtagctgggattacaggtatgtgccaccatgtccagctaattttgtatttttaatagagacggggtttctccatgttggccaggctggtctcgagctcccaacctctggtgatctgcccgcctcggcctcccaaagtgctgggattacaggcgtgagccaccgcgcctggcctattttaattttaattttatttttttgtgagacagggtctcactctgtcacccaggttggagtgcagcggtaccatcagggcttgctgcagcctcagcctccccaggctgaagtggttctcccacctcagcctcccaggtagctgggactataggttcatgctaccatgcctggctaatgtttctattttttgtagaaacaggatctcgccatgttacacagggtggtttcgaattcctggactcacacaatcctcccgcctctgcctcccaaagtgctgggattacaggtgtgagccaccacatcaggcctgcccctcctattttgttccaattatttacgaggggttgagcaaagaagctctccagctaaagggactgagcttttactccctgcagctgtgtgacctcaggcaagttagtctcggaaggtgcttctgctacacaggtatagcatgccatgaacgggggctttgtcatgacgaccacgatggtgatgatggtgctttgccctgattctgattggctgggttggtgaagggctggggtgcttcctcctgaaggtgatcctatgaaccgccccagagaaacactcctgcatctcacagcgttctccctcgtgctcttgtcttctctttcctaccagattccaaattctcttcccaagaggtggcatgaacctgtgagtcccagctgcaaccaacagagaagcaagcgagccgtgaacctcatcgatccggccagtcagcacctccgtctctccacgcaggccaggtggctccagatgcgggacttgctcctggcagcttggcagctttgcagctttgcatctgtaaggcgtatattaccgtagagtgcttttcagcgttacataagtcattcgtatgtattgcagaaagacagcgaggaaaagagagactgcacttgttatgggctgagcgttcaggtgggcgtgcctcccccggattcacctgtcaaagccccaacccccagcactgcagaaggggactgcgttggagatgaggtcctcacagaggtgattagggtaaaatgaggtcgctagggtgggccctgattggaccggtgtccttgtaagaagagcagatgaggacagacacacacacagagggacagccctgtggggatacacggaggagtcggcgtctgcatgccaaggagaggcctcagaggaaccagccctgctgacaccttgatcttggatgttcagcccccaggatgtcagaggatgcgtgtctgtggccgaggccctgcagcctgtgtgctgtgcacagcagcccgggaagcaaatccagcacatcaacaaggctgagaaaacacttgtctttgcggcccctactgccggaggccaccacacgagcaaggggctgcagtctccctgctgtcagaagtttgctctgtgttctggcagacagcacccccatcgtggagcttccgggagacgggtgctgctcaggctgggtgcacagaagggccaaggcagggtagggctcctgtatcagggcccgggtggggttgccgggtacagccctgtcagggaaaggcccccgaggaggtggatttgtaaaggacagactcagggacagaatttcagagaaactcgtcagtggctttcccctagtgcaaattcacctgatactcgcggagacctatgagaccagctggtcagcgcccaccaccgcttttgaccacgcaggaagcagacgctctgaacaagacaatgtgcccccaacagaacccccacaccgctgacacgcacacagactcctccagcatagccacccctccccacgaggcgcacagactcctccagcatggccacccctccccatggagccgtgtccggaggcagagggggcttgtggtggcagagaacacgtgcctcccgcccctcactgcaccgcgctcagggggcaccagggactgagcccttccagctccggcaaaacagaggaacaaaaacacactgattttatgagaccaagttcagtctgtggcctgtcccgacactaaaggatgggcttattttttagtgtaatgacaggaccagggacgttaggaaattaaccagatgagaactgaaactgagggagaggccctgaagtacctcctctagtgtttccaagaagtgacactaggcttgtgtttagcggcctgtgtggtgccttcccaggcaggaggggtgtggtctgagtgcccttatctaacgctcacttgtctcccagaacgaactcttctgttgcttgagtttcaaaatttttttttttttttttgacagagtctcgcgctgtcacccaggctgcagtgcagtggtgcaatctcatctcattgcaacctctacctcctggtttcaagtgattctcccacttcagcctcctgagtagctgggatttcaagcacccaccaccacgcccggctaatttttgtatttttgtagagatggggtttcaccatgttggccaggctggtcttgaactcctgacctcaaatgatctacccgcctcagctgggattactgagattacaggcgtgagccactgtgcccagccttgaaatttttttgggtgggaggggtacacagagagcaagtttatatggtgaatgctgatggcaaacatcatccaagagagacaagatgggaaaggtgctgcaaccagaggccctagggagcctcaggctagatacgaaatgtcacccagggaaaggcctgggctctggggaggctggcaagaccctcagccattcagcagcctgcggacaagcacttcggagtcaatgcaaccactgctgtcctcatgccctgccaccagcatctctcctcctctctctgtcatctcctcacccagtgagacaagaacatgctggatttccgcgctcatgacggtgccattctcttccttgtcaaacacctgaagtctttccacataatcctcttaggtgccctggtccctgttccctgccactgtctgcagcaggggcaggaagtgctcaaagtccagcaccttcacgttcatctcatcactcttggggttccccaggacctcgagcgccgtggcattggtggggttctggcccagggccctcatcacgcccccacaggggctggaaggaccttgccatcacctgttcagtcaaacagccggaaggcagccttgaactctgtgctggtccttggtgaagtcacacgtcttgactgctcagctctacaggaactttccctgtagtaatggctcagtgaaatatatatatatatatatatatatatatatattttttttttttttttttttttttttttttttgagacggagtctcactgttgcccaggctggagtgcagtggcacaatctcagttcactgcaagctccacctcccgggttcatgccattctgcctcagcctcccgagtagctgggactacaggcgcccgctaccacgcccagctgggtttttttgtatttttagtagagacggggtttcaccatgttagccaggatggtctcgatctcctgacctcatgatccgcccgcctcggcctcccaaagtgctgggattacaggcgtgagccaccgcacctggccggctcagtgaaatattttataatcatgatctatgtctatgcctaaatcgccctgcctaagacactgaatagcctgagaaaactccctttcgtgctaactcactgggcttttttctggaagacttccttggccccgccggcatcagtacttgagccgctcctttccctatttttcgggaattaggtgatatattggatctgtgagccgttgggttctcctgcacgcatttaaaataccaaattgccgggtgtggtggctcacacctgtaatctcagcactgtgggaggctgaggcaggtggatcacctgaggtcaggagatcgagaccatcctggctaacatggtgaaaccccatctctcctaaaaatacaaaaattagccgggcgtgatggcaggtgcatgtaatcccagctacttgggaggctgaggcatgagaatcgcttgaacccaggaggcggaggttgcagtgagctgagattgtgctactgcactccagcatgggtgacaagagcaaaattctgtctcaaaaggaaagaaaaaaagaaacaaataaacaacaacaacaacaacaacaaaaaacctgttgggcgtggtggctcacgcctgtaatccctgcactttgggaggccaaggtgggtggatcacctgaggtcaggagttcgagaccagcctggccaacatggtgaaaccctgtctctactaaaaaaacaaaaattagctgggtgtgatggcacgcacctgtaatcccagctacttgggaggccgaggcaggagaatcgcttgaacccgggaggcggagattgcagtgagccgagatcatgccactgcactccaatgtggctgacgagcaaaactctatctcaaaaataaacaaacaaatctgtcgggtgtagtgactcatgcctgtaatcccagcactttgggaggctgaggtgggcagatcacctgaggtcaggagttcaagatcagtatggccaacgtggtgaaaccccgtctctactaaaaacacaatattagctgggggtgatgacacactcctgtaatcctagctactcaggaggctgaggcaggagaatcacttgaatctgggaggcagaggttgtggtgtagtgagctgactcgtaccattgcactccagcctgggcgacaagagcaaaactctgtctcaaaacaaacaaacaagcaaaaaaaaaaaccaaacaaatctgttgggaagctaaagtgggaggatcacttgagcccaggagttcaagagcagcctaccaacatagtgagaccctgtctctaccgaaaaaaagaaaacttagccgagtacggtggctcgcaactgtagtcttagctactggggaggctgaggtgggaagatcacttgagcccaggaggtcgaggctgcagtgagccgtgatcacaccactgcactctagcctgagtgacagaacaagaccctgtctcaaaacaaactccaaatttgaacaggtgaatttttttgttttttcgagacagagtctagctctgtcgcccaggctggagtgcagtggtgcactcggctcaccgaaacctcagcctcctgggttcaagcaattctcctgcctcagcctcccgagtagctgggattacaggtgcccgccaccacgtctggctaattgtgtacttccagttgagacggggtttcaccattttggccaggctggtcttgaactcctgacctcaggtgatccgcccacctcggcctcccaaagtgctgggattgcaggagtgagccaccatggcctggctgttaatttttagaaaacgtaggtatgttttgtttgtttgttttttgccccagagtacaatttgaaaaaatatttgtgtaaaagagaaaaactaaagtttttgcttgctcgtgtgcacatggcgtgtgtcctggtgtgcaggcgtctgggaggaagaggccttcctttgagagatggcgtttccctgtgttttctgagggggaagtgcatggctaaggagttgaagtgggtctgtccccttccctgtggcaggagcctgcttgggacagtggctcctgccttcatgaggaggctttagtgaatttaagggacccgtggatgtgtcttcagttcggaaacaggggcacaggtgcctgcccttgcctgcagagtagggtgtgggccccgggaggtgctctggtccaagccgcatttctaagcaagcgggaggctgaggtcttctttgcgggcccctgagtcacacaggcctccaggcggtggacattcagtggggtttgggtcctttgcaggtccctgggtcacacaggcctccaggcggtggacactcagtggggtttaggtgcacggggcatgcggggtgtcgtaacctctgcgaaagactccagaggggagtgggactggcaggtgagcctcagacccaggccccgagcaaaggctggtggccaggagcatggggccacacaccccgcctgctcggactggctggggtgcctgaagagggcagcctcggcctgcaccccagcagcctccacttggtctctctctgtctctgctcctccctcagccaggaccttggagcccctcagactctgacactcgctgagagggtgcgaagcgtggaccacagctcccagctctcacctgcccaggccctgcgctgggctttgcaggcctgcggtctttaccatgtggtcacttcacagtgcggttactgtcgccccactttgcaggaggagatggggtctggactcacccagggctgctactctgtgcagacacttccccacctgctggcgttggcctgctcttgtgaccttgactttgacctccaggctgatgaggccaggctcctctgggagtcgctctctactctctgctgacccctgggatgggggatggatgtgttacaggaaacgggtccggatctagacaccaagagggggttcttggatcttgcacaagaaatataattcagggtgagtccgtaaagtgagagcagtttattaggaaaataacggaattaagaatggcttactccatagacagagcagccccaggactgctggtcgcccatttttatggttattcttgatgatatgctaaacaaggggtggattattcatgcctcccttttttagaccatatagggtaacttcctgacgttgccatggcatttgtaaacttgtcatggtgctggtgggagtgtagcagtgaggacggtcagaggtcactcttgtggccatcttgcttttggtgggttttatccagtttcttcactgcaagctgttttatcagtaaggtctttatgacctgtatcttgtgccaacctcctagctcatcctgtgacttagaatgccttacctgtctgggaacgcagcccagtaggtctcagccttttactcagcccctgttcaagacggagtcgctctggttcaaaagcctctgacagatggcaacaatctcaccggactcagcgcctccagactgaactcagtttctcaagaatcatttccaggggtgaggtcttagtgcacccagggtttctaatctctttgctgtgaaagatcttgtttataatttttgcctctgtggaagtctatgtttaaaaaataatgtgtctcctaggaaaaaaagcttttgtttgcattgttttcctattacctattagccaaaaatagttaacgtccatccagtagagattagtatccacatgccggagttcgtgtatttacagcaaagttattatctttcgttttggtaaacttttacatctgagataaatatagagttgtctttgggcttttaagaatgccggagttaccccgagggcccctggctctcccggcatcctcttggagatcagggaaatctgggtgggaacctcctcattttacaaaaaaagaaactaagaccaaatgggtaacgtcgttgtttaaggtcacaggctggcgctgagccttggctctcagctcccctggcagtcgcgcgactcagcgtccagccctacctgctccagggccctccctactgccagccgctgcctgtcctctcccctgacctgccttgagccagactgggccccctgggccttgggcagggctggatgggcaagttgtccaatgaggccccctcagaactggaaagcctccttctgggtgtggaggtgggcagcaatctgccatttggccctggggtcatctctctggctcagtttgcttatctgtgagcccagatgtcggcaagttcaggctgagaattagagcaaataatgaagagggagcccctttcccagggcctggctcatatgcaccgtggacaacaaataccaaaaaggctgggcacgtggctcacacccggaatctcagcactctgggaggccgaggtgggtggatcacttgacgtcaggagttcgagaccagcctggccaacatggtgaaaccccaccactactaaaaatacaaagattagccgggcgtggtggcaggtgcctgtcatcccagctactctggtggctgaatgaggcagaagaattgctggaacccaggaggcggaggctgcagtgagccaagatcgtgccactgcactccagcctgggcgacagagcaagtctctgtctcaaacaaacaaataaacaaaaaaactacttttcttcttttcattcctagcaaaaatcccctctctggacaaatactactcaaggtcagaatctccctttgcccccagtttttcattgaggaggctgaggatctgagtctctctcttttttttttttttgagatccaatccagtctcactctgttgcccaggcaggagtgcaatggcatgatcttggctcaccacgagtctctttcttaataaccaaccccattaccgggtcaggagaagctgctgcgctgtggctgcatcagggcctagagccgggctgcctgcctctgctgccctgtgtgctggcggataaggtagggaggtttgttatgcctcagtttccttaaaggtaaaatggggtgtcagtcgtctctaccttgtggcctggttttggttaatgaactaatctacacacataacaagggctcaacaaaggttagcgatgacgtttcctgccaatctgagcacctgcacactggaaccctgtaaacagttgagggtgggtggctgacttccagttcccttcaaatgcttctctgagtgtctgcgcacctgcggctctccaggggctcgactcaggtctcagtgatcacagattctaatgaagaaagggtctgtctctgtcatccaggctggagtgcagggggcacgttcatggctcactgcagcctcgactcccacctaagcctcctgagtagctgagactacaggtgtgctggaccacacccagctaattttaattttgttgcccaggctggtctgtcagtgaagttttacaccagtgagacaaacataatatttggggctcatctaaaagctcaaagtgaggctgaaggagccatccaatgtttaaatgaagaggtacatcataattcatttttaataagtatgcagagctgggtggctcatgcctctaatcctggcattttgggaggccaaggtgagaggatcgttgaagccaggagtctgagagtggcctgggtaacagaatgagaccccatctttactaaataaataataaataaataaatagctgggcgtggtggtgcatgcttatagccctagctatttgagaggctgaggtgggaggatcccttcagggatcctgcagtgagctatgatcataccactgcactcctagcctgggtgacggggggacaccctttttctaatagtaataataaattataaaatatataaattataaaatgtgtgcttatgataaatctaaacattactacctaacatacatagaaattttattgtaataaaatttctttacccttgcccattcactatcatatcttcacagagccttctggacttgtatctgcctatgttgttttctgttttttttttttttttatttgtttgtttgttttgagacagagtctcgctctgtcgcccaggccagagtgcaatggctagatctcagctcactgcaacctctgcctcccgggttcaagcaattcttctgtctcagccttctgagtaactaggattacaagagagcaccagcacgcccagctaatttttgtatcttgttttagcagaggtggagtttcaccatggctggtctggaacccccgacctcaagtgatccacccgccttggcctcccaaagtgctgggattacaggtgtgagccactgcatctggtctttttttttttttttttttttgagatagagtctcactgtgtcacctaggctggagtgcagtggcacaatcttgactcactgcaacctctgcctcccaggttcaagcagttctctgccttagcctcccgagtagctgggattacaggcgcctgcaccacgccaggctaattttttttttgtatttttagtagatacggggtttcaccatcttggccagtctagtcttgaactcctgacctcgtgatccaccagcctcagcctcccaaagtgctgggattacagacaggtgtgagccaccgtgcctggccattttttgtttgtttgtttgttttaaataaagcacatcattgtatattcactgctctgcactatttttattttttaatttaacagatcttggagactatatcctatctgtgtacacagaattatcacatcacaactttagaaaatgttttaaattaaaaatgctaaatgaatgttctagagtttatttaaccaagtgtctggttgttctcaggcttcctgtgattataggtatagctgtaagtcagcacatccctgtatccacacatcccgtggtgcctgtgagaatttatctgtggcacagattacccaaaatgacatgaggggtgagaggttttacaaatggtgaattccacgagctttgcaaatcttaactcctttttcaagaataagggaactgtgagtaggacaggtgcacggtactttcattttattttagtctaagtattttctgaaataatttgaggaggcttaaagggaggtgcaagctgggtgcgggggctcatacttgtaatcccagcactttgagaggaggaggtgggagaatacttgagctcaggagttcgagatcagcctgggcaacaccgtgaggccccatttctacaaaaaaaattttttttaaattagccagacatggtggtgtgtgcctgtggtcccagctacttgggaggctgaggtgggaggatcacttgagccctggagttcaaggcttcagcgagctatgattgtaccactgcactccagggtgggcgacagagcaagaccctgtctcaataataataaaaataaaaaaaaaaaaaaggaaaaaaaggggcacagtagacagtaccagtacttggtattttaaatggttttcaaatgaagcccacccaagctcagcaagtccagccggggcctgaggacctgagcaggcgccaggtcacacaaggtaccgggcgcaggaggcggagcccgcagcgggccctgccctgacagcggcacctgcgcggcctccgcaggttctgggatcggccgctggccaggtgcaagggaggggggacggcagccgctgtcctggggctgagagggctccgcggtctggaggggacggcgtcagcgcccgcgggggttcgcagggcagccccggggcgacccccacccccgccacggtcaagtgtcgatacagtgttgccagccgggtgccaactatgaataagtccaagggcgcggcacgtgggccgaaacgcgatccttccgcggagccgctgcgcgcagggccgtccccaccgagcccgccgcgcggcgacccctgacggcgaccctaagccccggccgaccagggcaggagctcgcgcgcgaaacttccccggcgcccgcaggagaccccggcaggggagatggcggggcccaggcagagctcggaggcccctcccggccccaccccgcgccccggccccctctgcccccgacccggtccgggggagccctcgcgggaccccagcctggtccttcgccgcctccccccgttcagccccgacccccctgatccccgcgccccccgcggtcccggcccgccccctcccccagcccgggccccagccccgtccgttagcggatcccacgcaggctccgcgcccggccccgccggcgccctcggcccacacctctctccgcgcgcgtgtcccgccgtgtcgcccccgtgtcccctccgcgtccccccccgcgccgtccccccgcgtccccccccgcgtccttcccccgtgtccccccagcgtgtccctcggccgccccgcgcgcgccggcggaactgtgggatcgccgcgcacaggaagtggcggcggcggcgcggccgagggcggagggcggagggcggcgggatgggggccgggggcggcgggcgccgcactcgctgaggccccgacgcagggccgggccgggcccagggccgaggagcgcggcggccagagcggggccgcggaggcgacgccggggacgcccgcgcgacgagcaggtggcggcggctgcaggtgagcaccgaggcccccacccgaggtcgggccgcccccctcttcccccacgccccgccgccgcccgaggtcgccctcccgccgccggaggtcgcccctgccccagccgtccgacctcgggccgcccggggccccgcgccgcaatgggccggccgcgctccgcggggcgcggggcctgggaaggcgcggggccgggaggaggtctgggcccgggtcctgtgcgccccccgcaaccccggcctccccggcggcctggtccagcgcgaggccccggccgcttcccgcagcagcctcggtggcgctgggcccagcggggaggcccgggggttcggggcgcccgggaggggcccgggccgggccgagggagggcgagtgggttcccgcggggacgtcccatccctccgtcctggactctgctccgggccccgctcggctcccccgtggacaggacgcgcccgccgcctggtttcggggcgcggcggacccgggaccccccccaggggcctcctcctcgcgcgcccaggccaagggagcagtttcacttttgccgctccgcgcggggagggctgcggggcccggggttggctgtgggttcggcccggagaccggcggcgcgtttgcaccgggcgggtcaggggatggggtcagtccgggggcaagagccgtgggggcgaaaacccactcctggccaccccaggacccttggaacattggtcccaagtacttaggaaaggagggttattagtatttgaaggcagttaaaaatggtgcagtgtttttttttttttttttaactttgagagaagtttagtgacatggggaaaatgcttttataaatggcttcccagacctttaaaaaaaaaaaagcacaattttaaaagctttgtctaggagaatacttgagcagttgggttctttttcctgggaaacatgatcttagtagaagaaagatgtgggctgttggcctccagacagagggtgatgagcatgcggctcttattaaaaatgaaagccaacgccgagagcctgctgggggctgggaggtggggcgggcggcgggcccaggctgctagagggacccaggatcctgcagcttttaaattgcaggcgcggctgctccgactcgactcgcttaggaattgctgaacttcgtcttctcagtttgaaagcttcagaggggtctcccgaggatgctgagcactctcttgatttggccacttctttgccgccccccctccctctttccaaccaatcctcctcccccacagagttcggcgttagcctgtgcctgttacaactcgcttcttgtatccatttctggttagtcttaagtatcttcttgaggacattgtctaaaaagcagctgcatgccattgacattcagacagaacagggccccttggccttagaaggtgtaggggccttaaatattctgaaggtgacttcatggagtggccgccctctgtggtcaccctacctgtgcgtggccctgtcctggcgtatctgccagggggacgcgctgcagcagcctgaagactgctgggttaaaggcagtgtggccgggtgggaaagtccccaggagtgtggattctagaacaggccttcctggagggagggtgctgccccgccccaggctggggccccagtgcagactccacgctggggagctacaccctgcgcctggacgcgcgtctgtgtgccaggactggggaagcaaactgaaagtaatggctttattttggaaattagaaaaagagcattcaccaaagtaatctgttccgtccctgccgtagacacgtgactgatacacctgcctcccatcccctccgcactttgacctcgtaaacaagtgatctgacacaacagggcttgagttacttgcccgaggttgtgtcacggaacggcagggccgcctttaggcttacatccctggaactcccacctccacagacccgtccgggtgctgaaagtccacggatgctatccctggtcaaatcagaggtaggtgggaaatgttggaattctcctaaacagggaaggggaagatcagaatgtgtgtttgagaagagcctgatttcctggattcctttggaggaggggtgtccttaacttgcccaatcacatttaccctgttcatcaatcttcagccccgcttaggctctcacattgcagaccccacggcagagcccctagtgcttggcactgaagagccagtgcaggcccgttgtcaccatcaaaacccacctctggtaaattcaatggcttctgcttccacgctttgccccccctctctggccttgtcaaaaactcttgtgatgtccctgttataaggtatcgccggtggactggtgtttctagatcgcagcgtgggacgtgattggctacatttgactgtttcctttttaatgacttgtttaatgtgagatctttagctgctccatctcattgcaagatttttgttacagtaaagttggactgagttttctaaagacagttgctcagaaatttcatgggaatttacttttggttaaccgaagagtgtttggggttttaaacgggtcgtttcaagtggtaaagtaacatgaccacgaggcgtctgtccttcctaaaaccacttcatcataatttcaagattgattctaaattaccaatttcaaagcgctgcattttaggcaagtgcattaatcgttcaccttctgacaggctttcatgtagtcatttacaagcggccatgttttgattatctttgtcaagcaaagtgcaggagacaggcagtctcataaccttggggcagtgtctgtgtttagttttggaggcgggaaggccgagttgatggtgaaagttggccattctttctgcagggccaaagtctgtacctggctattagggtgcatggatgctggggttaaattggccacgtcttttcccaagcctaggtagaaggattgcagataggatatgttttaaatgttactggtggtgaattgaaagcaacacaactatccttcagtgtgtgactggcagaaatctacctcctggctagcgtgccctgtgtcacttaagactcaaagtggagctgggtgctcttggtgggacagtgtgcctgcagcccagaggcctgtccccagtgactgggaaggctatgcatcattgttggagatggtctcgattcctttctgaaagcgggtagagaatgaaatgcataataaataacaataatgatgaattataaaatgagcagcagtaacaagctgtacaaggaaatacctgtcctgagatcgattactcacccctgactgtctgccctcctgattctcagccaggtgctgggagctgagtaccggcgctgcagccacgctggctcttgttctcttcctcatgtcctattagctgacctgacactaaatctgtcacctgctttatgacatgcttaccttattattttataagctcctctacatccctgtaaggagagtggtattgccccatcacacagaaactgacagagacactgacatgggaaactgagtggggaagtgtggccagcgtctcagcttgggcaaatctagatttaaacaaaggtccaatagaatccaaagctgttattctttccaccaaaccaccttgatgctcataagatccaatagatgaaaatctacatttctgaaacggagactaagtcattggcttcacatacacgtattcatttaaacacttttcacttgtagaaggccgtacttgctggactgggggctctgaaatctccatctgaattgatagaaacagatacatgctggatatggaatcaagaagaaaattaattcaattgacgtaaattcatctatgctcagctttttacggtacacttggtgggagtaaaatgaagagctgtttattgactcctcatgtgaagaatgtgctgatgattgggttaagcttttcatagattgatttctgatttaggccattgtcctagtctaattggagtgattgattgagtgaacaaatgtgcattttattagggagctacacataatttttgcattgagaaattaaccagttgttatactttgtaaaatatggtgtactagcattgatttttgccaaaatagacagaagtcagattgttagaggaagaccgcgtcagtttgggttatgcacttgtcagtttgggaagcaggtgccacgatgagatgggaagtgcaggaagaaaccctgcagaggatggtgggggagcaccagacctccaggcaggtctgacccccgtgagaggaggcggagggagcagtgctggggaggaggagcctcagacccagccctgagttaggcacagccagcccagtgccaagtggacccccagggtggccctgcgtgagtacccgctttggtcattacccctgaaggggtcccgaaggtgtctcagcaaggaggctgtggctcacctgtctcctcacctgtcaccttgaagcggctttctctggcagagctccatggcggcctcagaaacaaagtttagggacttaaaattttatgcatgtattttagaggtggggcctcactgtgttgcccaggctggactcaaactattgggctcaagcgatcctcccaccttggcctccccagtaactgggactacaggtgctgccaccacacgtggctaagtttagtgacttttgataatccacaaaaacaaaaggaacagtaaagacaatcccaactgtgactcattatgcggcacgggcgggcgggattttggattagttttaggaagcgaaccacagccgtcctccttggactccctgccgtggctggcagtgagctggtgcagggaggcgaagtgctggtgttctgggaattttcaaatgcactacagcgatcaggacacacgtgtttcagtgcacacaggttattttcagttttctaaatcaggagcttattactatgacttaagttctagaacattggttagaaaatatgtttgtcgtgcagttcagttccagctccaggctagcattgcattttcctggagccccaaagcctttgtaacttttacttcttttctttaaatgttagtgaattattgggtccccgggtggtggttcacacctgtaatgccagcactttgggaggctgaggcacgtggatcacttgaggtcaggagttcgagaccagactggccaacatgatgaaaccccatctctacttaaaaaaaaaaaaaaacccaaaaattaaccaggtgtggtggcgcatgcataggtcccagctactcgggacactgaggaaggagaatgccttgaacctgggaggcggaccttgcagtgagctgagatcgtgccactgcactccagcctgggtgacagagccagactccatctcaataaataaacaaataaataaatgttagtgaattattcagtatataatgtttctttttggtgaacaaagctatacaggaaaatcgtaaacacagattctgacagggtccagctaggaaggtaagtgagaatgcagacatgaggcctatgaaggggtggctgtggtgaacatgagtgagagactgaggcctctttcacagggtctggctcacctgaccacccgctactgacccccagctgagcagggccaggtgggtataggaccagagtgactccatctttagtcttccgagagaaaccaggtatctggagttttatatgcaatgtatttatttttaacaaactgcacacgccaaattacaaatgttgccaactgaattcaactggggctactgtttttacagtctctgggctacagtatttatttcttgaaacaaagtaactgaactaattaaatgaggacaaaacacgcatttccaaaatgcaggaagagagggggaaaaatcccaagaatttatgtgcagatgaaaccaaaagaatcattgcctctgtctcagggatggctgctggaaacagcgttctctgatgatgcttagaggaaaggagaagatggtactaagagaataagcatcaattggaaaaacaacgtaactccacgtgtctttaagggcctacgggagaccctcccgtaagatctatgcaaagataaagcctgcaaaaaataatgttttcagaatgcatccatacatttaccagaagcacttctaatcttgacctgtttacatggaatgttctatgtccatgtctctggacacacgtgatccacatacccgtcagcacttggcattgctgttgattttcgcaaagctggtagatgcaaagtgttgtgcagttgtggtcttgatttacgcctgcctgctggatgaaagtgagcatcctgcatatttattggttatgtgtgtccttccctgtgaagttcctgttcatgtgcttcatccatttttcttttgggtgatgtctttttctcacctattccttatatatagtttccatattatatatttccttatagattcaggatgttcatctttggctgtaatgtgtgcattatatatttttcccagttgggttttatcttttcactttttttgttttggtgaaaagatagttttaatgtaatgtataattttatccatccttcttttctaggtagtgccttttgcatgttactttaagttcttcccaattcttgggtcacaaatgtattctgtatttttctgtagaagttgtaaagtttgctttctctgcttaagccctttatctctctagagttgactgtgcaggtcttccgaggtgtcttttgataaagcaccgtggtatttcacattccacctgacactctgtgcttacatttattcccaggtgcccttattattgttcttgcttttgtaaatggtgtttttttttttttttcttttgagacaaaatcttgctctgtcacccaggctggagtgcagtggcaggatctcagttcactgcaacctctgcctcccgggttcaagtgattttcctgcttcagcctcccgagtagctgagattacaggcatacgccaccatgcctagctaatttttgtatttttagtagagacagggtttcaccatgttggccaggctggtctcgaactcctgacctcaagtgatccacccacctcggcctcccaaagtgttggaattacaggcgtgagccaccgcgccggccgtaaatggtgttttttatttttattgatttctaagtctttgctggtgttctgtagaaatgcagttgacttttgggtattgatttaacagctgatcaccttgccattgcttaaaatttatttgtagattttggggattttctcagtagacattcacgtcatgtgggagtggtgaagactctgtttcttccttatatctttcgtatttttccttcctgttttgctgcctgggccaggccctcctgagcagggctgtatggaagtgtgacaggccatccttgtcctgttcctgattttagggaaatgcttctaccatgctgccttccggtgtgggtacaaacagtggccgtttagttctgaatcgtcccactctgcctccttgaagcagaggaggcctggtgtgagaaatacaaacaaagtgacccaaaagcaaggagctggagagatggaagatccactgtcatgggtcaccgggaagacgcagaaacaaaaccacagagagctgcggcctccccctgccgggacggcgaaacttaaaagactgtggggacaagtgctggagaagatgtgggggcagacagagcactggtgccagcgtggctgctttgggaatggcaggagctgcagggagatggcatcgagtggcgggtgcacctgccgtgtgcttcccgggggacatgctgaggtgctcatagtggcatgggtgttggagtcagaccccgggagctctctcaatgcctgtctccaaataaaatgaaaaataacctcgtgctacattcgccatggaaaggggaaggaaggagctcctccaggccgcaacatgtgtgcgcctccggaggataacgctgggtggaaggagtgagccgcagaagtgtatgcagcacctgacttcatcaaggtaaagcacgcgcaccagcaaaacccatgtgccctgaggactccggctctagtacctggaaggagaacacagggcttctgcatcctctgcctcccgggttcaagcgattctcctgcctcagcctcccgagtagctgggattacaggcgcgcaccaccacgcctggctaatttttgcattttcagtagagacggggtttcaccatgttggccaggctggtctcgaactcctgacctcaggtgatcctcccaccttggccttctaaaatgctgggattacaggcgtgagccactgcgcccagcccaagttgtcagtttcttgatacaaaggtcagaatattttcttaatttttaaatctctactatatctgacagtaaatcacccttttcattcctaaaatggttttacctttcttttctagattcatctcacagaggctcatcttttttattagtgttcacaaagaaccagctatcagtcttactcattttctccactgtgtctttgtttccgtatcactaatttctgctcattgtcaggatttccttctacactctttgggtttattctggtgttctctttctaggttactgaattgaaacattttcttttctattttctctaagcttagtttcttaattttcaactttctgtcataagtattttattattattttttgagacagagtctccctctgtcacgcaggctggcgtgatctcggctcactgcaacctccgcctcccggattcaagtggttctcctgcctcagccacctgagtagctgggattataggcgtgtgccaccatgcctggctaactattgtatttttagtagagacagggtttcaccatgttggccaggctggtcttgaactcctgacctcaggcaatccgcccacctcggcttccccgagtgctgggattacaggcatgagccaccacgcccggtcctgtcataagcatttaagtctatgtagctttcctacttagttctgctgtactgtcgtcttgtttattttgatatgtaatattttcattgttcagcattttacaattttattattcttccatgacccatgaatgcatttatgtccaaaggcattgaggattttaggttgtttttattatgatttcagctgaaaagcctcatgggcagagggatatagtctgtatagcactgagtctctggcatttctttaaggattgaattctattatgtatcttctggcttataaagttgcggttaggaagccagctgtcatttcaattgtccttcctgtgtcagtagtaagctttttgtctggctgcttttatagtctctttatttctggtgtttttcaacttgactgtggtctttctagcatggatttctttttgtttatcctgttttggattcattgtactttctgaagataaagtatcatgtctttcagcaattctggaaaattttcagccattattttgttcaatacagtcattctgcggtatccactagggattggttccagaacccaccatggataccaaaattagtggatgcttaagttcctgatataaaatggtgtcgtatttgtatataacctgtgcacattctcccatatatgtatttttttctttgtttttgagatggagtctcactcagtcgcccaagctggagtgcagtggcacgatcttggctcactgtaacctccgcctcccaggttcaagcaattctccagcctcagcctcctgagtaactggaattacaggcgcccaccaccacgcctggggtaatttttgtatttttagtagagaaggggtttcaccatattggccaggctggttttgaactctgacctcatgatctgccctcctcggcctccctcccgtgtatttttaaatcatctttagattacttatagtatctaatacaatgcctatatataacttcattaatgtggatttaatatagtagagagcagcaaattcaagttttgcttttaggaatttttccacccaaatatctttgatccacagttggttgaatccacaaatgtggaacccctagatatggagggtcaaccatacagcatctgccttatgctttgctttctcataccatcctcccagccacttaaactctcgttcatgtttttacctttcagtctttttatgcttcattccaggttatttcttcagctgtcttccaatttagcaactctatcttcatctccatctactgtgctatttaaataggtatacattttttttgagatggagtcttgctctgttgcccaggctggagtgcagtggtgcaatcttggctcactgcaacctccgcctcttgggttcaagtgattctcctgcctcagcctgaagagtagctgggattacaggtgcccaccaccatgcccggctaatttttgtatttctagtagagacggggtttcacccatttggccaggctggtctcaaattcctgacctcaggtgatccacctggcttggcctcgcaaagtgctgggattacaggtgtgagccaccgtgcccagcctctgcgctattaatatttaacctgttattgttgttctttttcttttttctttttttttgttggtagagatggggtcttgctatgttgccagggctggtcttgaactcccaaggtcaagtgatcctctcacctcagcctcccaagtgctgggattacaggcaccatgcccagcctaacctgttcttttaattttcatttttttaatagttatatttttcattcctgaaagttctctttgtttttttccaagtttgcctctcctcttgtttggtattcttttccttacacttatttttattttctctttatgtctaaacatacttattttctatactgtaactaataataccaaagtaataccgataataatattaacaaatactaaaatttgaatttcttgagggttggactccgccacttgttctgctacctcttgctccctgatccttgcctgtcacacactttgtgattttggattgtgggctcatttcacatgggctttgtctgtggattcctgcaaggcttgaagggagcaaagcctccctggagaagccctgctcctaccaggagtccaggagtgggactgatctagaattactttaggctgatttcctgggctcacaaaggggatgtctaaagacataattgacttagatggaaagtgatcctacagcagaaatctgagattgaagaaattgctgatggtggaggtggatctacataaatcctgatgagtgaaaccgtaatgaacagtagaaggaatgtcacagattagatataccaaaatgaccaggctgtctggggggaaattttttctcactctaaaactacctggtggaggacaacgtgtaatttccagggtgtttaaagctgggaagcctccccactgagcacgtcattatcaaatgcttttcaccagtttttgttttgttttgttttgttttttgtttgttttatttgtttttttttgagacaaagtctcactctgttgcccaagctggagtgcagtggtacgatcttggcttactgcaacctccgcctccagggctcaagtgattcttgtgcctcagtctcctgagtagctgggactacaggtgcatgccatcacgcccagctaattttttgtattttagcagagatgggatttgaccatgttacccagggtggtcttgaactcctgagctcaggggatccgcttgccttggcctcccgaagtgctgggattacaggtgtgagccaccatgcccagcccaccagttttaacaattgcaaaatgtgactcagattttgtccttataaacttaaccttttgtcgacttccctgtcacccatcccacctgagatgctttctgctgctttagcacaggcagactaggttgccatttcaattggctttcttcagatgacttgtattcggtagctgaagaactgctgtacatatacatggcatatgccagtaatagttaaagggcatgtgaggtttcaaaagtagaaaataaatgtgaaggaaaagactaggaagcacctgaaatggtgctattcttttttttttctttttgagattcactcttgttgcccagtctggagtacaatggtgccatgttggctcaccacaacttccgccccccgggttcaagtgattctcctgcctcagcttcctgagtagccgggattacaggcatgcaccaccatgccctgctatttttttgtatttttaatagagacggggtttctccttgttggtcaggctggccttgaactcccgacctcgggtgatccgcccgccttggctttccaaagtgctgggattacaggcatgagccactgcgcctggctgaaatggtgctattcttgggatctggctgaggatatcttcccagcaggcccattcccatcgttgttctggtatcaccatcttgtcccctctatcttctgtctccactggtgtccaggacagaaacctgggccccatctatgacccccttcctccatctcccacacccccttccccatctatggctccttgaccctcacgattccccttgcccgcctcctgccccaccaccagcctcgctttcgactgagactgcccgtggtcttgcgtggggtcgctccagctcagatcccatcacacttgttccccacagaacaagaggcagcctttcagtggccctgcgctttccccgccactgcttgctcagcccccacccgtgatgacgcctgctgatgtcagtgtcccccgacctcacgctctgcacccccacacccggtcttcaagctgccccactggccacactctgccttggactttagcctgcctggaacacactttctccttttgcctggtgacttcgacctggatgtcactttgccgaggtggcctgctcctatcctgagtgtgagttagatacacacacacacttaatgcacaacggagtcacgtcgtggctctgtctctgcggcctgcccgcttcagttcacattgcactgctgaccttcccatttgccccctcgagggagggctgcactgggctccgctgtgtggacacagccagctgtggccagccctgtcaatggacactgatgccgctccgttttcccagttataaatatgatgggcatccttgtacagttcttctctagtcaatgtcttgaaggtaaagtctacaggtggattgctgagtaaagggtcttgccatttcaaagacgttagacacgttgttgctgatttaccctctgcaaagatcacgtctgtttctactcacaccagtagtatttgaaagaatgacactgttgtagatgtttaatagttttttatttccatttgtctttttttttttttttggacacagagttttactctgttgcccagacgggagtgcagtggtgcaatctcgatcttggctcattgcaacctccacctcccgggttcaagcgattcttgtgcctcagcttctggagtagctgggattgaagttgcacgccaccacacctagctaatttttgtaatttttgtagagatgaggtttcaccatattggccaggctggtctcaaactccttgcctcaagcaacctgcccacctcgggtcctaaagtgctaggattacaggtgtgagccaccacgcttggcttgtcttctagttttgaaattcaacatgccactggctgcagtgtctcatgcctgtaatcccagcactttgggaggctgaggcaggctgatcactcgaggtcaggagttcgagaccagcctgaccaacatagcaaaaccctgtctctactaaaaatacaaaaactagctgggtgtggcagtgcgtgcctgtaatcccagcttctcagaaggctgagacatgaaaattgcctgaacccaggaggtggaggttgcagtgcgctgagattgtgccactgcactccagcctacaacagagtgagactctatctcaaaaaaaaaaaaaaaaaaaaaaaaaatccaacatgctaagactgagtaaagcttcatctcctgtgaataccgtataaagcacaattgatgctgtacagtattttatttcagctgtgaaaagggaccgcgggtgtctggctgtgctggaggaggagtctggtctttctcggtgggaagtgctgggtggccgtgggcttggaggctgggtcgtgggggtgtggcccaggcaagtttccttctctgctctcggctgtgcacctgtctccttgtctgttctccttcagcagtttgtgaggctgcacatgtgaaaatgccttgtcaatggcacagtggcacgtggacctgctgcgctgtgtgcgtgtcagggcggccatgttgtgtgtggctgtctgcactctgagtcctggctgggccgcccggggatgatggcacttagggaagagtgactgcaatcaatgagcaccacgttgaaaagcagagcaatctagaagcgacagcctgagctctgcgcctttgtcctgagctggccttaggacctctgggcacctggtactcttgcttcccgtgagctcccgtgtccccgcatcctggcatgtgggcctctccctatgctcctggggtggaactgagaagacgtgggttctgcccgtctctgttactgtttattcttgaagaacagggcagcatgactccggggcggaggacgcagccctgcatcccttgcgtccccaggcatcttaggagcactgtggaaactcagggtgtggacttgagcttcgacatcagttggcactggccttttgcacccatgaaattgatgtttgtctgtggcctcccaggctggtgctgtgttcctggaccagcgtccgatttccctgctgctgaatcacttcatggctcagcacagctgagggcagcaactgttgtcccctagagcccgagatctgggagcggcaggggcagccactgttcctgtggaacacactggagaggcatctgcaggggcggggtggggctcctggtcagcctgttcttgtcttgttctggtgccacttcctcaggtatgcgagggctgcctttgtaagtcactggcaggaagatgggaaaggtgctctgcaggtctctactgccaggagctcagctttgatcttgagtgctggtggctgtccagctttactggcagggattctgatgactcagagacagtagctacccttttcccagtggtattgccactgagtgtgggatgggtcacagctatgtctgtggccttttgcaaatcaacttcaaaatttgcagtcacatttatggtaggacagattcatttcacaatgattttgccaattacccttgttatttccactcacatatatctccccaaagtggaaacaaggacacgtctagagacaggcgctggacgtctcctgctcactggcattaagtgggcaggcggcttattgctgagtgatggtccctggacatttccagtcgactgtgtttgacatggtggtgaattggacacgtgacaggtggcaatatgttaactgttcgtagcaaggaagatttgttttcaggctggtggtttgattacaagttggtcattcttaatgccagggagggggaagagagagaaaatgagagagaatgaatgagaacaaatgtaagaactttttttggaaaaaaagaaaattgagaagaaagtgatagtaattactaattgtttttactttgtcacttattatgtatttatttccagaaagggatcagttttttcttccttccaagttttgtggaagaaaaagaaaactgaaagtatttaataactgtgtcataatttttattttgtgccttgtgattacattgtattttggggagtgggtcaattttttcttaaattaagaaatgctttatatgaaaacacatacataaagtattgaacccctgcacctgcctcaagtggagaaattaaccactataaatactttagaaggcaaagggttggtgaagctgaaaactgctaaaattcttaacatgcagacagaaaagggaggtgggaaggatgtcgccctcagagaacgtgtcatacctcagcctgtgctgtctggggcagacggcatgagccatgcagcccacagaggcatgctggaaacatggctggtgggaactgagatgtgtttgtggtgtgaaatgcacgccgatctcagaggcttgatatgaaagagaatgtaagtgatctcattcatattcttctatattggttacacgtagaaatgataatattttggatatactgggttaaataaaatgtattattaatttttttttttagatggagttttgctctgtcgcccaggctggagtgcaatggcacagtcttggcccactgcaacctctgcctcctgagttcaagccattctcctgtctcagcctcctgagtagctgggattacaggtgcatgccaccacgcccggctaatttttgtatttttaatagagacgggggtttcatcatattggtcaggctggtctcgaactcctgacctcaggtgatccacctgcctcagcctcccaaagtgctgggattacaggcgtgagccaccatgcacggcctattaaaaacatttttttgccaatttctttttacttttgaatgtggcctctagcaatgtaaagttgcacacaggccggcatttgcagctcacgtgtgtttgccatgttggcgtggtccagggtctaagccactgcaggggcagacccttgtcccttgggtgagtccctcatctgggggccctgtgcccagggctgagggagtggtcagtctcagcctgtcattccccgccctgccgggccccacatctcctttgcataatggaggtaatgcaggaaaatgcttagagcagggtctggcaaatgtgttattagtgctctgtgttattaataaagcattgtgatgtctcttgtgcagtatggaaataggtttcgtagattgcactcaggatttcagattgacacgtatttccatctggaaactcttgcacgcgtttgcactgggagatgaagtggtccctgttggctcaagctgcagtgagagggtggtgggggtagactcagtcccttgccggggttggccaaagcaggcttcctcttcctccctcaggtgtgtgttatcggaggtttcattcctggaaaatccagtgtctatgaaaccaacatacatggcgtttgcatcacagttggagtcagatgtgagcccggagggcaggtgtctggtaagacccatgaaggctgcatttcagcccccctctaagaaccagcagtgccttccatcactgcaacagcaaacacccctccataaacatctagggcagcgagcagtcacatcccgtgagactcaactgggtcagagggcccttgcttgggtctcctccagccacgggtgccctggtcttggggggtggtgcccctgggtggggcttaaggaggtagctgcccagctctgcctgttgtctccatcctcaggggcctggggcaactgctggccaccaagcagtgtccagtgtcatagccgctcacttgtcctgtggggccacccatgagatgcaggattcctggtcagccccaacaccaggcccacacctccacgcaggcctggaaggcaggagagagcaagctttcttctcctttatttgtgaattatcagcacctagaaacttaagcgggcaaatgctgaattgctggagactgtgaagctgtgatacacacagagttgctccttcccttcctggctggggtgctggcctggggagcctcctgcccgggtcactccactgcgcatgctctgtggctaccgtgagactgacctgcctcagacacccttctccttgagcctcaagggcctcatggcctggacctccgtgatcagccagaggagcccagagtccatggtgctgtggcctcctgcccactctgggaccccagggagagggcctgtcctcgctgagcctccgacaccggttctgagcctcttggacaacattttctctccagtttacaagtaggagccccttgcataaataagatggggaaaatccctgcagatgacatggccggggccctgggccccgggagccatttctgttccttgtcactcagcctggccagtccttgagtttttccccagagtgtcctcaataaggaatagcaagcctgggtattttcttctggtcagtattccgtttttttgttttgttttgttttttgttttggagatggagtttcgctctgttgcccaggctggagtacagtggtataatctcggctcactgcagcctctgcctcttgggttcaagcgattctcctgcctcaggcacccaagtagctgaggttacaggtgcccactgccacacctggctaatttttgtatttttagtagagatggggttttgccatgttggccaggctggtctcaaacttctgacctcaggcaatccacctgccttggcctcccaaagtgctgggattacaggtgagagccactgtgcctagctaattttgtatttttagtagagagacggggtttctccatgttggtcgggctggtcttgaactcctgagctcaagtaatccgcttgcctcagcctcccaaagtgctgggattacaggtgtgagccaccacgcctggccagtgttctggtctgtttgtgatgggtgtaagaatctgtctctttaaagaggtgcctctggccaggtggttacctctgtcaccagagatgagtcacccagtctcagctcgcaggccttcctggacgttcccagatagtccccagtgctggaggcctgtcgaaagtgtagctccaccacgccctttgatctcttcctcctctcctcttccccacccgcttccccctccttccccctccttccccctcctccttccccctcctccttctctcctgctgagggcatttggcctcatagataagcggtttctaatgagctcactggtttccgatggtgggtggggagtgactctgggctttctgtgctgcctcttcgacctcgtccctgttttctgctgtgcggagcatggccctttcctaatccgaaagagccgcacagtcccttccagtgctgcctgtggtctcgcccagctggctgtgctattgcgggacatggggcccagcctcctgctccttcagaggcctggggtgggtgaggctggggtgccctggtgctggatgcaggggtgctgtggtgctgaatgctggggtgccctggtgctggacgttgggtgcccaggcactggatgctggggtggcctggtgctggatgctgggtggcctggtgctgggtggcctgatgctgggtgctgggtggtctggtgctggatgctgggtggcctggtgctgggtgctgggtggcctggtgctgggtactgggtgctctggtggtggatgcagaggcagggctatctgtgggtctgcccttgggtgtggggcaagccaggtcagcatattgcaaagcacacgttgggctgctgcttgtgtaattgtctccttgtctctgctctctcccttctcccacctcacatgggatagatcggagttaacagtgatgcctttgttttttgtcaaaagcatcatactcatgccccgtggcattctctttaagggaagagctggttttactaaagatgtgcttcaatgcagtgacgtgcggtgctgagcaaggccgggaacctggcccctgacctgtgtacactggccggccgtgctcccctcaccctgcggctagacctcaaatggcatccccacctccctcagccaactgcagcccctctggtagcatggagctcgcagacgctgggtgcaggaggcctgggcctgggccagacgggttccctgcacagctgcttttgcgtcattgatgcagacgcggagactcacttctctgcttcgtgtgttcctagttggtctccagttcttgaacaaataactttcaattacaattttttttctacttatgattgccagtttttcttttttctttttttttttttttgagacagagtcttgctctgtcacccatgctagagtgcaatggcatgatctcagctcactgcaacctccacctcccgggttcaagcaattctcctgtctcagcctcacaggtagctgtgattacaggcacacgccaccatgcctggctaatttttgtatttttagtagagatggtctactaaaaatcaggctggtctcaaactcctgacctcaagtgatccacccgccttggcctcccaaagtacagagattacaggcataagccaccgtgcccagtgccagtttcttatataagctgatttggaggaagaaaagggcctgttgtttgatgactctgtggccccaggcccagccctgtggaagcctggagtatacggccggggtttgtggcacaggcgaggggagccacaggtgaaggtgtgcaggtgcgcaggtgcgcagggctcctgtgggtgagggcaccgtggctcagggatgggtaagcagtgttttcaggagcactgaggagcgggccagtgctggcaagggggttccttggcagcagctgacaggagggaaggttgcccggtcaggggctccaaatacaggcaggggtttttgcaaagccggggcagcgacatggcaatcgtgatgccataggaagccgaagcctgcaaagggcacagctgggtggacgcagcacctgcggccagagactggtggctgagcatgggggtgcctggcatggaaacttgcagggcttggagctgatggttaggggagggagtcaccaatatcacctctgctcctcctggcagtccccctgctgtgctatcaaatattaggtctttatactagatctttttttattaaaaaaattttttttaaagatggagtcttgctctgttgcccaggctggagtgcagtggcgtggtctcggctcactgcaacctctgcctcccgggttcaagtgattctcatgcctcagtctcccgaatagctgggattacagccatatgctatcatgcctggctattttttgtatttttagtaaagatggtttcaccctgttggccaggctggtctcgaactcctgacctcaagtgatccacccgactcagcctccaaaagtactgggattacaagcatgagccatcacacctggccaaatactaggccttattcattctttctaactaatttttatacccattaacctccctctacccccatatccttcccagccttctctgtcttcatgagttcagttgttttgatttttacatcccacaaataagtgggaacatgttatgcttgtctttctgtgcctggcttattgcacttaatataatgagctccagttccatccatgttgttgcaaatgacagaacctcattcttttttatggctgaataatactccattgtgtataagaaccacattttctttatccatccgtctcttgatggacatgtgggttgcctccaaatcttggttcttatgaacagtgctaaatgaacatggaagtgcaggtatctctgatatactgatttcctttcttttgggtatatacctaagagttagatagctgggtcacatggtggctgtatttttagttttctgaggaacctccaaactgctctcaatagtggttgtactaactcacattcccaccaacagtggtttgctggagatttcatagtgcaggaactggctaaacgtgggtactccaaagcagccctgctaaccaggtcaaggcccagctccttctctgtttttgcaggtgaagtagtactggctgtcactccattgccttcttggtgcctgtggccactgttgagctgcaatggccccaagcctgaaatattcaccatcttcctgcccagaagcagtcgccaccctctgttctggatgaaaagaccccaaagaaacaaccaaatgcagcctaggaacctggattagagtccaggttgaaacagcaactatctcagtgtttctgggacagctggggaaatgcaaatgtaggttgactaatagatgatatcagggactaagggttaattttcttagtgtgctaattttattgtgatgatgaagaaggccttactcttagcagagacacactgaaatatttgggtataaagtgctatgatgtctggaagtaatgctcaggtggttgaggaataaaagcgtgcgcacacgcacacacacacacacaactgcgctctcctcaaatgttaattctaatataggtagttgtatacagagtttatttatttatttatttagagacagagtttcgctctgtcacgcaggctggagtgtagtggcgtgatcttagctcaccgcaacctccacctctcagactcaagtgattctcctgcctcagcctcccaagtagctgggactataggcgcccgccatcacacccactgacttttgtatttttagtagagactgggtttcgccatgttggccaggctggtctcaaactcctgagctcaagtgaactcctgcctcagcctcccacagtgctgggatgacaggcatgagccaccacgcccggcccatatacacgttcttgttgtactattaattcaacttctctatacaaacttttcatttaaaaagttggagaaaacatcgtgttttagttttttgtttgtttatttttgagacagagtctcactctttcacctgtattggagtgcagtggcacagtcgcagctccctgcagcctcaacctcccaggctcaaacgatccttccacctcagcctccaagtagctggcactacaggtgcacaccaccacacccagctaatttttaatttttttgtagagatggggtctcagtatattgcccaggctggtctcgaattcctgggctcaagcaatcctcctgtctcagccttccaaaatgttggaatgacaggcttgcatcactgcacccagcttggttttactttttaacatttgtaaggctttactccacctggaattgtttttgtgtaggatatatatatatatgaaagctaatgtatgctgggcttaatgcctaggtgatgggatggtctatgcagcaaaccaccgtggcacacgtttacctgtggaacagacctgcacatcctgcacatgtaccccggaacttaaaataaaagttgaagaaaaaaagaaagaaaccttagcagggtagctagataaatggtaaggtcaatcaatattcttatatatcagcaacaaacaggtagaaaatgaattatttaaataccagttacagtagcatccaaaatatgaagtaccaggaaaacattaaacagaacatgggccgggcgaggtgcttcacgcctgtaatcccagcactttgggaggccaaggcgagcggatcatgaggtcaggagttcgaaaccagcttggccaacatggtgaaaccccatctctactgaaaatataaaaattagccaggcatggtggcatgcgcctgtaataccagctactcaggaggctgaggtgggaggatggcttgaacccggaaggcggaggttgcagtgagcttagattgtgtcattgcactccagcctgagcaatagagtgagaacttgtctcaaaaaaaaaacaaagtttcttattgattttaaaaatcttatctgtacattatttcagatttttaaacatttatttctttaacttttagattttgaagtgcacagtcatgtcatctgtgaataacaacagatttgttttccttttcagtccttagatttctattgacttttcttgtcgtcctgtgctggcatctccaacaagcatgggactgaggtgatgaaggcatgttggcgacagagggtcctcaccaaagggaaaccttccttgttacactgctaagtgaagtggttgttgtgggtttttttttttttttaatgttttttatcaagttgagaaaattcccctccatttcgcatttgccaggaggttctggtttttgtttttaatcacaatcatgattggatgttgccagttacagtgaacttgtggctttccccttttgatttgttaatatcatgttaaaaagtccctgcattcctggaataaacccaatttagccatgatctttttcataaattactggattagttaactaatacaggcacaccttggtgatattgtgggttccgttccggacttcggcaataaaataaatatcacgataaagtgaggcacacacattttttgatttcccagtgcatacagaagttaggtttatgctgtgtacagccatgccaccctgaacgtgcctgatctcatcagaagttatgtttctgctatactgtagtctgttaagtgtgcaatagcattgtgtctaaaaaaaacagtgtgcatgccttaattaaaaaatacttgattgctaaaaaatgctaatgatcatctgagccttcagtgagtcttcgtctttttgctagtagacgggtctgcttcgacgtgaatggctgctgagcactcagggaggtggttgctgaaatggggtggccattgcaatttcctacaatatgacattttggatctgtgtccctaaaatctgacattttggatccgtgtccctaaaatctaacattttggatctgtgtccctaaaatatgacattttggatctgtgtccctaaaatctgacattttggatctgtgtccctgtctgaatctcagttgaattgtaatccccagtgttggcagtggggcctggtgggaggggatcggatcctggaggtgggttctcatagtttaacaccgtccccctagtgctgtaactgtgatagagttgtcgtgagatctggctgtttgaaagtgtgtggcccctccccctctgtcttcctgctgctctggccctgtgagaccgcgcgtctgcttcccgctttgcctccgtcatgatggtagacttccagaggtgttcccagaaactgagcagatgccaccatgcttctgaaacagggtggagaattgtgagccaattcaacctcttttctttataaattacccggtctcaattttttttttaagacagggtcttgctctattgcccaggctggagtgcagtggtgtgatctctgttcactgtagtcttgacctcgtgggctcaagcgatcctcccacctcagcctcccaagtagctgggaccacaggtgtgagccaccatgcctggctcatttttgcactttttgtagagatgggttttcaccaccctgcccaggctgaacttgaacacctaggctcaagccatccacccgcctcggcctcccaaattgctaggattacaggtgtgagccactgtgcccagccaggttttttttttttcatttatttatttatttattaattttttgagacagagtcttactctgttgcccaggctggagtgcagtggcacaatctcacctcactgcaacctctacctcccaggttaaagtgattctcctgcctcagcctcctgagtagctgggactacaggcacccgccaccacgcctggataatttttgtatttttagtagagacggggttttgccatgttggacaggccaatctcgaactcctaacctcaggtgagctgcctgccttggcctcccaaagtactgggattacaggtgtgagccataatgtctggccagccaggtatttgttaatagcagtgtgagaacagaccaatacggacagcaatgaagcttgccacatggatggactctctttttcacaagttttctctgtagcacgtgatgtcatttgatagcattttacccacagtagaacttctttccaaattggagtcactcctctcaaaccctgcagctgttttatcaatcaagtttatgtaacactctggatctttgttgttatttccacaatgttcacagcatcttcactaggagtaggttctaccttaagaaaccatttgctttgctcatccataagaagcaactccgggccgggtgcggtggctcacgcctataatcccagcactttgggaggctgaggtgggcagatcacgaggttaggagattgagaccatcctggctaacacagtgaaaccctgtctctactaaaaatacaaaaaattagctgggtgtggtggcaggcgcctgtaatcccagctactcaagaggctgaggaaggagaatggcgtgaacccgggaggtggagtttgcagtgagccgagatagtgccactgcactccagtctgggtgacagagcgagactccatctaaacaaaaaaaaaaaaagggagcaactcctcacctgttcaagtttgatcatgaggtggcaataattcagtcacatcttcagaccccactaataattctagttctcttgctatttccaccacttctgcagtgacttcttctgctgaagtcttgaactcctcaaagtcatccacgtagcttggaatcagcttcttctaaactattaatgttgatattttgaccccctcccatgaatcatgcgtcttcttaatggcatctagaatggtgaatcctttccggaaggttttccatttactttgcccagatccatcagaggaatcactatccatggcagctatattcctatacaatgtatttcttaaataataagacttggcagtataaattactccacggctgggcatggtggctcacacctctaatcccagcactttgtgaggctgaggtgggtggatcacctgaggtcaggagtttgagaccagcacggccaacatgatgaaatcccgtctctactaaaaatacaaaaattacccaggcgtggtggtgcacgcctgtaaatccagctactcaggaggccgagacaggagaatcgcttgaatctgggaggcggaggttgcagcgagctgagatcatgccactgcactccagcccgggcaacaagagcaaaactctgtctcaaaaaaaaaaaagaaaaaaaaagaaattactccttgatccatgggctgcagagtggatgtcgtgttaccaggtatgaaagcaacattcatctccttgtgcatctcccccagagcttttgggtgaccacgtgcattggcaatgaacagtaattttttgaaaggaatccttttttcctgagcagtaggtctcaacagtgagcttaaaatattcagtaaaccatgctgtaagcaggtgtgctgtcatccaggctttgttattccatctctagagcacaggcaaaagtagatttagcatcattcttaagggctctaggattttcggaatagtatatgagcattggcttcaacttaaagtcaccagctgcattagcccctaacaagaaagtcagcctgtcccttgaagctttgaagccagacattgacttctctctagttgtgaaagtcctagatggcatctttttccaatatcaggctgtttcgtctacatcaataatctgttgggtggtcatggtggctcacagctgtaatctcagcactttgaggggcttgaggtgagtgtattccttgagttcagaagttcaagtcaagaccaagctgggcaacgtgacaaaatcctgtctctgcaacccccaccaaaattagccaggcatggtgacttgtgcctgtcatctcagcctcttgggaagctgacttgggaggattgcttgagcccaggaggcagaggttgcagtgagctgagatcatggcactgcactccagcctaggcaaccgagtgacaccctgtctcaaaaagaaaaagaaaatctattgttgagtgtggccaccttcatcagtgatcttagctccatctgcagatgacttgctgcagcttctccgtgggcacctactgcttcacctgcacttttatgtgaagaagatgtggcttcttttcttaaatctcctgagccagcagcctctgctagcttccaactttttctctgcagcttcctcaactgtctcaaccttcacagaattgaagagagtaagggccttgctaggcactaggctttggtttaagggaatattgaggctggtttgatcttctctccggaccactcgaactttctccatatcagcaataacgctgtttcattttcttatcatttgtgtgtttacctaagtagcacttttaatttcctccaagaactttttctttgcattcatcacttggccaactgtttggcccaagaggcccagctttcggcctatctcggctttcaccacaccttcctcagcaggcttagtcacttctagcttttgatgtaaagtgagagctgtgcaactcatccttttacttgaacacttacaggccatcagagggttattaagtggcctcatttcaacactgctgtgtaacagggaatagggaggctggaacagagggagagagatgggaagagccgctcggccgagcagttcagagcatgcacgacctttttccactcagttcctcctctgatgggggcccggttcacagcactgaaaacaattatggtaggaacatcaaagatcactgaccacagatcactgtgacaggtataacaatcatgaaaaagtttgaacgattgcgaaaattaccaaaatgtgacacagacgccagaagtgagcacttgatgttggaaaaacgtggccgatagacttgctggattcagggctgccacgaaccttcacgctgcaaaaactcagtatctggaagtgcagcgaagccaggcacagtgaacaagcttccttccggcttctggcgttcatgctcgtgagtgagactgctccgtaattatcctttgcatcctgtttttgtcaggttttggcaaaaagattatattagcttcaaaatgcactgggcaggggccaggtatttctttctttctttcttttttttttttttttaacttctctaaaagagtttatggaagattggaatccctacaccaagagtgtaggatatcactggtgaaatcgttctgaacttagcatgatcatttttttggtggtggatgtttgacttttgtttcagttttgtaacgattatggtattctttgggttttctattttttttttttggtaacagctttgtggagatatagttcacccactatatgactcacccatttcgaggggataagtgtgataatttaatatattcacataatttgtaaaggtcaatttggtataaattggcatatctgtcaccataagtatttgtctcgtctttaagctaaaaacattcaaattcttctctgctatctattttgaaatatacgatagattattgtaaactgtagtcaccatactgatctataaacaccgggtcttatttctaggtcttacttcttttatcaagtgtttatctatacccactaatcaacctctcttcctctctgcccctgatttattcttgaggatatttttgtccgttattgttcttaggaatttgtccatttaactttacattttcaagttcattcctatgaaaaggcatcagtggcctctgattttaaaagacctgaagcactggactctgttcccctttctttcctgacctgattcgcacctcctctctttttatcatcaactctcttgataaaactcttttgattttattgatcctttcagagaaccaactttgtggctttttgtatgttttctatcttattaatttctgagttttagattgttttgttacttcttctaaatttgttttcctaattttttgagatatatcttgtgtcatttgttttcggcattttattttattatttatttatttttttttttgagacagagtcttgctctgtcccccagtctggagtgcagtggtgcgatctcggctcactgcaacctccacctcttgggttcaagcgattctcctgcctcagcctctgatgtagctgggactacaggtgcatgccaccatgcccagctaatttttttgtatttttttattagagacagtgtttcaccatgttgcccaggctggtctctaactcctgagctcaggcagtccgcccgccttggcctcccaaagtgctaggattacaggtgtgagctactgtgcccagcctgttatcagcattttacaatgttctaatgcagtccacacttaaggttgccactccccttaggaactgtttaggctgcgtcagcctatatgtagtgacaggatttttttttttttttttttttactatttcattcaacatatttttgaattcctcttttgaattttttgacaattgatcactttttaaaaaaaaatttttttttgagagagtctctgtcacccaggctggagtgcagtggtgcgatcttggctcgctgcaacctccacctcgtgggttcaagtgattctcctgcctcagcctcccaagtatgggattacaggcaaccgccaccacacctggctaattttttgttctttgtttttcgtgggtttttttgagacagagtctcgctctgttgcctaggccggagtgcaatggcacagtctcggctcactgcaacctccacctccctggtttgagtggttcttctgcctcagcctcccaagtagctgggattacaggcgcctgctaccatgcctggctaattttttgtatttttagtagagacagggtttcaccatattggccaggctggtcccgaactcctgacctcaggtgatccacccaccttagtctcccagagtgccgagattacaggcatgagccactgcgcccggcctaattttggtatttttagtagagatggggtttcaccatgctggccaggctggtcttgaactcctgagctcaagtgatccacctgccttggcttcccaaaatgttgggattacaggggtgagccaccacgcctggccgtgataactgtttttaacttctgagcataccaggatttttgcagataactttttgttacttttttttcccctcgtttaagcgtctgtggggtgaaggaatctgctctgcttgatctctgtcttctgaaactttttaggacttgccttatggcccagcacacggtcagattttaaaatgttctgtgtgtctttgaacagattctgttctgcagtggtaggggcagcattgtgtgtagattgattgaatcaagtttattcatcatgttattcaaatcttctatactaagggtcagcaaactacagcctataggctaagtctggctagctacctgcttttataaagttttgctggaccgcagtcacaccatttgtttatgtcttgtctacagctgtttttgcattgtggatttgtctattttgtctagcagttgtatcgagttttgctttatatacttgagagctatgttattaggtgatacagacttaaaattttatatcttccttatgaatgaagcgactattactgtgaaattatcttcttacctttttaatgctttctgcctttcagactttgtctggaattaatatagcggcaccagctgccttttgtttactgtttgctttgcatgtctcttttatttttttatttttaatttttctgtatctttaaatctgaaatgtatctcttgtagacagtgtatgattggaggatcttttttaaattgaagtttgacagtccgtttttttttttttttttttttttttcagtatttattgatcattcttgggtgtttcttggagagggggatgtggcagggtcataggataatagtggagggaaggtcagcagataaacatgtgaacagaggtctctggttttcctaggcagaggaccctgcggccttccgcagtgtttgtgtccctgggtacttgagattagggagtggtgatgactcttaaggagcatgctgccttcaagcgtctgtttaacaaagcacatcttgcaccgcccttaatccatttaaccctgagtggacacagcacatgtttcagagagcacggggttgggggtaaggttatagattaacagcatcccaaggcagaagaatttttcttagtacagaacaaaatggagtctcctatgtctacttctttctacacagacacagtaacaatctgatccctctttcttttccccacatttcccccttttctattcgacaaaaccgccgtcatcatcatggcctgttctcgatggtcgctgtcccttcggagctgttaggcacacctgcagaagggttcccagacagggcggccgggcagaggcgctcctcacatcccagagggggcggccgggcagaggcgctcctcacatcccagacggggcggccgggcagaggggctcctcacctcccagagggggcggccgggcagaggcgctcctcacatcccagacggggcggccgggcagaggggctcctcccatcccagagggggcggctgggcagagacgctcctcacttcctagacggggtggcagccgggcagaggctgtaatcttagcactttgggaggccaaggcaggcggctaggaggtggaggttgtagcgagccgagatcacgcctctgcactccagcctgggcaacattgagtattgagtgagcgagactccgtctgcaatcccagcacctcgggaggccgaggcgggcagatcactcgaggtcaggagctggagaccagcccggtcaacacggcgtctccaccaaaaatacaaaaaccagtcaggcatggcggcgcgcgcctgcaatcccaggcactcagcaggctgaggcaggagaatcaggcagggaggttgcagcgagctgagatcagggcagtacagtccagcctcggtaacagagggagaccgaaaaaagaaagaagaggggagaggggagagggagagcgacagttggttttttaagtctgacaactaaaaaaatttaactggatcatttatttggtttactttaaatgtagctgcagatatttgcgttgaaatataccatcttatattttgttgatttcttggtctgtgctgatgttttcctttccttctcctttcttgctctttttgagtcaactattgatcctttcattttctgccctccaccagtttggatgttacagactctgttcttttactggtttccccacaagcacaacattcttattaaacgaatctacaattaacctgtacgttttacactcgggaatatccaaggacctgcaagcatccttaccttcgttaatgccccttacaactaatagactgtgtatttaaattctttttttttccccaagacggagtcttgctctgtcgcccaggctggagtgcagtgggccaatcttggctcactgcagcctccgcctcctaggttcaagcaattctcctgcctcagcctcctgagtagctgggattacaggcacccaccatcatgcccagctaatttttgtatttttagtagagacggggtttctccatgttggccaggctgatcttgaactcctgacctcaggtgatcagcccaccttggcctcccaaagtgctggtattacaggcgtgagccaccacacccagcctgtgtatttaaattcttttttacttttgaatatcacaagacattgctggattattactgtttttttttttgtaggtacagggtttcaccatgttgttcacgctggtctcaaattcctgaactcaagtgatccttgtgccttggcctcccaaagtgtttggattataggcgtgagccactctgcccggcctgattacattttgtgttagatttgcacacacttgccgctctctttcctttacgttttgcatctcagacttcccatctgggatctctttttctccttgaagtgcacgtacatgagaaattcctctggttagagtgtgctggtggcgaacccgccccttgtgtttgtccggaagcactagttttccctgccccttgggggatatgcttgctggttgcagaactcttggttggcagtgccgttctttcagcactttgatgtcagcctctgcttggcgtcagcatctttttgtgtgaagacatccttgtcaggccatctctcctttgaaggtagtctcccttttttctcaggttgcttctaagatcaaaattaaaaacctttgtgctacaaaggacaccatcaagaaaggacgaccacaggaagggggaagatgtttgtaaatcacagatccggccggggatgtgcacccagagcctctaaaggtctcttagaaggtctgagcgattcgtgaccggatccccgggacgcccttgcccttaccgagtgcgttggggagggctggcagacagggaggagggagccctgctgcttgggctggccgcggtgagcagcggcagcgctgtggttctggctcttgccttcctgccctgagcagagcacccctcccatctgctccccaccgctgaggatcactggtcccccaggaggcttcccaggcatcacctcgtgtgtgtgtgtgcagcagctgcctcggccccggttctgttgggtgttgagaggagcttgggagaacccatgactgggagtggtagagattcgtgacccagccccggtgatgctctcttgacctgcctaggtcaagaagaaattgggaagaggcgatgaactgagaggaggagtgtctcaggtgctgtcagtacatggtctgcctttggagcaccgccttctttttgctgattaagtgcaggcttgccttctagtttaacgtgggcaggcaaatagtcctgctattgcattctgacatagaaaatgtactttgagtgagatgtcttcatggagagtaaatgatctggaggtagaaagaaaaaggcaaatgcttttgttctcttccagagacggctgtcaagctggctctgcaagtcaggccctctgcagctgaggttccactttagacataggtcagtgtgtcttggagagggaacacctgtgaggtccactggagaagcccattctggatgagtgaaaacctggatttaaaaatgcaagattccagcttgcacttctagccatggtggaagatacagaccaaatttcacagcctaccttaatcaaccagaaagccaaacaaaagtgcatgaagccacaggcttcagacactggtggcaggccgtgtggacagtgaccagagaggggcatgagggaagtgaggcctcagtagcccagcgtgtcacctgcagagtctccagccacagggcagggaggggaaccaggacctggtggagacagagtgtggagttaaggggctccaggaaggctggaatgtacaaagaaaaatatggaagaagagggagttccataaagaaacagctctggagagctgaggaggggccttccagtctctgagagctgaccacaggtggcatgtgaatgctgcccaggtgagggaaaggggcgtgggagagcaggggtggcacagtccccgagttcacagggtggggtgaatctgtgtgctcagtggccagagggagagactcaccacccaaggttgtcctacaaaggtccgctcaggactcaccaaacagagcttacgagcgagatctgaaaagatcaaactggttctaggttgactgctcccagaacaaagcccggagatgcaggacagcagcaaacccagcgtccagtgccaagttcacaggcaccaagttcacagtgcccagcagccaagcaaaagtgactgccatacagaaaacccagaagaagaggaaaatcaatggttggaaacatccaggctagacactgtagcccccacctgcaattccagccctttgggaggctgaggcaggaggatcacttgagcccaggagttcaagaccctctggggccacatagcgagaccctgtctctaaaaagatatgtgttcttttgtttgttttaagaaaataattagctgggcatagtggtatgcacctgtagtgccagctactcaacggcagaggcaggaggatcccttgagcctggagttcgaggctgcagtgagctatgattatgccactgtactctagtccaggcaacagagtgaaactctgttaaaaaaaaaaaaaaaaaaagagaagagaaaagagaagggaagggaactatatctatccagatgatagagctagcaggcaagcatgttaagatggcattgataaatatgttccacgtgttcaatcagggcaaatatgataaaaataaagaaaaaaatggaagatataaaaaaaagacctagggccgggcgtcatggctcatacctgtaatcccagcacttctggaggctgagatgtgaggattgtttgagctcaggagatcaagaccaccctggacaaccccatctgtacagaaaagtacaaaaattagctgggcgtggtggtgcacacctgtggtctcagctacttaggaggctgaggtaggaggatggcttgagcccaggaaggttgaggctgcagtgagccatgatcataccattgcactccagcctgggtgacagcatgagactgtctcaaaaagaaaaaagacccaaataaatcttctagaaatgaaaaatatgctgaatgggattagtggtagattagacattgcagaagaaaagatcagtatacttgaagacacagcactttgtaaaatgaaacacaaagaaagaaagacaaaaaaatgaacagagcatcagtgggaccatatcgagagtaacatatgaaactgatttccagaaaagaggcgtgtgtggtagaaaatacctgaagacaataatggctagaatttttccagatctgatgaaactcatcccgaagaagctcaacaaatctcaaaccgaagaaacatgaaggaattcaccccaatacacaccatcatccaattgccgagaatcctgaaagtagacagaggcaaatgctatcacatacagatgaacaaagccaaaaatgagagccggtttctgatcagaaactatacaatttgaagacagtggaggaatgcctttcaaatatcgaaagacaatattggacacctatctacaaaaacaatggcccttcaccctactttatgctatatttaaaaattaaccaaaatggatcatagacctaaatgtgaaagttagaactgtaagattaataggggaaaatatgcgatatatacactgtctttgtcaatttgggctgctataaaaaaagttaacactgactggctggcttaagtaacagaaatttatttctcacagttctggaggctggaagtccgagctcaaggtgcctgtaggtttggtggctggtgagggcctcttcctggttgtgccctcatatggcagagagataggaagcagctggcccgtgtcttttggcataatggcaccaatcccatttttgaggctcctccctcttggcctaatcccctgccaatggccctgtctccaaatatcacattagcagggaggatttcgacgtatgaatttggaccaggcatggtgactcatacctctagttccagcactttgggagggcgaggcaggcggatcacttgagctcaggagttcaagaccagcctaggcaacatagtgaaatgctttgtctacaaaaaatttaaaaaattatctgggcatggtggcatgcacctgtagtcctagctacttgggaggctgaggtgggagaatcacttaagcccagaagactgaggctgcagtgagcggtgattgtgccacggcgactccagcctgggtaacagagcgagatcctgtctcaaaaaaaatatgaatttgtagctgggggacacaagcattcagtccatagtgtctgtagtggaatattatccagcctgaaatgtgaatgacattctgacacctgccaccaagtgggtgagctttgaggacattatactgagtgaaataagccagtcacataaggacaaatagtgtatgattccacttatatgaggtccctagagtggttaactcgtagagatagaaagtgtgatggtgggtgccaggggctagcggggatggggagtaggtgtttaatggagacagtgtttctgcttgggaagatgagaaagttctggagatggacaggggtgatgattgcacagcagtgggaatggacataaagcccctgaaccacatacctaaaaatggtggattttatgttagtggacgtcaccacaatgtaacacaaatgagcaaacacgggctttttcctggttgccggcaggcaggctaatggtctgctggcgggggctgggctgggctggattttggagaagcccagggctgcggctggcagggctttgggaagcagcgggagcgcatgtaaggctggtgtagctgtcgcaggagctgtggcatccggaggggcccatggtggccccgcctttccaagagcctgcaggtggctgggtggcttttccgtgtccttcctggggcgtgacctctggcggctccgggactgttcatttatgagccatctgttgggcctcctggccaggcagtgggaagcagcgtgccagcaatgccctgaatggccttgaccctgatgtttaagtgacggagtgtttggttgatcgggaaaggatgttaatgcgtgcttgtcagtctccctgacatgcagcctttcgggttttgaagtggatgcatatatttggtcacacggcgtctctccagtcctgcgcaagcacgttgacatgtgtgcctttcactttcaggcttgtccagccggaagccctgagggcagctgttcccactggctctgctgaccttgtgccttggtaagtgggcagtgaggccgcctgacgcagggcgccgtgtgtgagagtgtgtgtgtgtgtgtgtgtgtgtgtgtgtgtgtgtgtatgtgtccagtgttggggtcagcgttgggccttgataccttgttgattaatttttcttaaaggtatatattttaacctttgcttatgaccaacagaatatttattacagtcccttctcatttgtccaaaacccagatgataaagttcaggtaactttgttctcttcctgcgagggatgagctgagctcaaaggggctgagctacaaatgacgctgggctgaggcgcctaccagggcacagcggacatgggagtcacctcacagggctgccccggctctgttagcagcccaggaagtccacccctctcctggagaccgactgggagccgtctgtctgggatggggcagaggtgtggcccggggacagctgcacaatccccgtggggagcccagctatctgttgctggagggtgctctgctcctggggggtcggtgccctgctcttgggggttggtgccctgctcctgggggacgcgctcctcaggaagccctgggtttggtggagagcatggaattgcctggccgttgagtcactgggtgggcccagggttggggcagctcctcctgtgctcctgcagcccgtcgtcatagggcccctgcccactgctcccatgtgttccacccccgttcccaggcccgctgctgtggctgatgaggctgcaggtcccttctgggtggccctggaccctgtgtccttctcccactgtggctgctttctacccaggaggtgtctcctccaaatgctgtcggcagagatcaaatcccatccctgatgttccaaggcttccaggtgtaactcacaggcccagttcttggtaggcaggtgatttagccttctgtgtcccagtcacaacccagggtgtgttgaaagctaccatttgataaaaacaaacatgagcaagattgaagtgaccaacaccaagctcgggctttcagagatgtagtcatggcggacctcaaacagcattgctgaccatctgagctgggtgctgaatgcctccatagttttcaaattaaaatgactgtatttagtgtctctttttttaaaaaaaatatttatttatttatttatttatttatttatttatttatttatttatttattttgagacagtctggctctgtcgcccgggctggagtgcagtagaacgatctcggctcactgcaacctccacttcccaggttcaaatgattctcctgcctcagccccctgagtagctgggactacaggcgcccgccaccacgtccggctaatttttgtatttttagtagagatggggtttcaccatgttggccaggatggtctctattgcttgacctcgtgatccacctgcctcggcctcccaaagtgctgggattacaggcgtgagccactgcgcccggcctagtgtctctttaggattgttttattaagattgcttatttgatagcagataactatgaagatactaacgatactataaagacacagtggcagctcccagctaactggcactctgagctgtcctctaacattctggattcacaaaagtttacttgctgggtttgctcattgttgatttaatactttgcctgtggtttaaactgttaaattgttgcaaattgctattctgtgcaaaagaaacttgaactgtcctgcaccccccagttcagctctcactgcattcccgctcttctgcctgtcctttggctattgttggactgtactcagggctgagaggagggcatggggcttctgcagtcaccacagggctgtgggaaggccaccagcaagggctggggggccagagggcttctgatctgtcaggtgcagggtgtggcgcacgtgggcttgtgctgtggatgaggttttgcttctaggggagaaaccggccaaggcgcgtcaggcatcagcagacctctcccagaaggaggacattttgagaagatgaagatggaaatcggtttgatctcctttgttccctttctggggacagggacatcacggttctgtaataactgaggtctaggaaaaagaacagaaagaagggcaggttggaaacattgtgtcttttggggctagtagtagctgcagaacaacccaaatccgatttacaaccaagcttctagggtgagtaactcgatattcaccaaaccgggtgactgtcagtgatggcatgccacgtatcacttttgggagggaggagaggttgcaaaactaagcagacggtgtggcactgcagctcccccccgcccaagctggtgagtgttaatatcgaaatctatagcaaaatgtttgtccatgacttgcaccagtacctctcgaaaggtgcccaaatacctaataaacatctgaaaaggcatgcaactcaattggttatcagagaaacgaactttttaaaccagaaatgttgtatcactagacagtcagcagattggctaaaaccaacgagacagataaggccagagttgatgaggaggtgggatggggcgtgatgggacgcttgttcctcatggtggctgtgacctcacctcttaattttggaaaactttggcaatatcttctaaagcggagcaaacccatggcttgtgacccagcagctctgctctgaggcgtgaacccacagccaggagtgtcgccggagccgtgttcatcaggcctgtgtgccctgcggaggtggactgggtgaacacactgccggctacttgcccaggggagcagcatggaatgagctgcgtggagacacccgtgctccgcctgggcgagccgacacacacatgctgggtggaagaagcgcagtgggtcagcacatgtgcaaggccctcgtaagtgcagcacagagacaggcagacctggcagggggaacaggaagggtagctgccctggcaggaggcaaaggaggcccagggggcttcaggggctggcgagggtctgtttcttttctttcttttttttttttttttttttgagagggggtctctctctgtctcccaggctggagctcaatgacgcgatctcaggtcacttcagccttgagctctcctgggctgaagggatcctcctgcctcagcctcccggtagctgggaccacgggcatgggccaccacacgcggcttttttattttttgtagagaccgggttttgccatgttgcccaggctgatcttgaactcctgggctcaagcccatctgccggcctcggcctcccaaagtagttgggattcgtttcttgatctgggtgctgctggtcagagtggatcctctctggaatttcatccagccgcatgctgaagatttatgtacttctctgtatctattacactttaacaaaaagtttcccataaaactgtgccataccaggtacggtggctcacacctgtaatcccaggactttgggaggccgaggcaggcggatcacgaggtcaggagatcgagaccatcctggctaacacggtgaaaccccatctctactaaaaatacaaaaaattagctgggcgtggtggcgggcacttgtagtcccagctactcgggaggctgaggcaggagaatggcgtgaacccgggaggcggagcttgtggtgagccgagatcgcgccactgcactccagcctgggcgacagagcgagactccgtctcaacaacaacaacaacaaaaaaaccgttccatataagcttcctaagagcttgcgttttcggtttcatctgattccctctgtgaaaaatacgggcttctacaaaacagcagactcaaaaagcaacaacaaccaaacccccaaacccagcagaccgataccatgttaaagccacacgtttgtcgattcccctgctcgggtgtttgcgcgccctctccgtcgcacggctccgtgtgctggagaccccacgggaccgagtagtccccaccctcgtggaagcatgttcccgtaatagcagagcaaagggatgatggtcttcggaggagggcgctggctcaggcaccccagggacgctttctctttccgtgtgctggaagacctgaatgcttcagagcctaaattatgtgggaaaaacgtgtgtgtgttccaaagctggagtgagatttccaaggcttgtatgaggcacttggcaagcttcacttgtgccctaaagcacaaaataccagggcttggggtgaatttggtgatatccagagctggcagctttgttggggctggtcactccccagccctgaggactctggggaaggaatgcctgtcgtgagcggaaccagccaagttcacacatggccacctgccaacctgacctgtgtgttgagccccggcccttctcgatcagaaaggaggtgtcccgatcagggggagcacatgggctgggaacttgtggaacccggtgtgtatgactcgctccgtgattcataacaaggcatttgctttcctgggccttggtgacctgtctgtgaaatgggcacaggagcccagctcttgcatagacagaaggtgagggcatggggtagggggagtggagccgtgggtgcggcactagaaggatgagaaaggacctatggcctccagctccgggttcagggctgtgtccaggttcaggggactgtgaaatgccagcagcttctaaaacctttgggttctttaagaaaaggctaattgcagaggatgctcactgatgagggcgaggatcaaagcccgtgctgcgtcagcgtggtggcctgccagctccaggctgcaaaagtccctcgtcatttcatttccttccatccctgtggagcgaaccctgttgtttgcattttttggatgagggtacaggctcaggctcagctcacacggtccccggatgcccctgctgtgctccgaggttggcctgcgtcttttgctcctgggtccttacgtgccctgtcacagccagccctgccctggagagagaggccactgggaaaaaccctgagagcaggcgggcctcacctgaataggacttcattcgttgattttaatttttacttactattttttttctttgtacaacaaacattgtctgataagggacttcactcttccaacttcaagaaaggctcctcccgggtctgggtgctccaagggccccattgggccgatcctctgacatcacttggtgtggcttcctcggaagctacaggcccctcggtccatggccccttcacggcaggcagtggactggccggcggtgggccactcatttttcatacacatttttttttttttttttttttgagacggggtctcactctgtcgcccaggccggagtgtggtggcgtgatctcggctcaccgcaagctccgtctcccgggttcacgccattctcctgcctcagcctcccgagtagctgggactacaggcgcctgccaccatgcccggctaatttttttgtatttttagtagagatggggtttcaccgtgttagccaggatggtctcgatctcctgacctcgtgatccacctgtcttggccttccaaagtgctgggattccaggcatgagccactgtacccggccttttcatacacatttgaagaggactttaaagtgttcttgagtctttcctggataatgaaaggtatcccgacggtgctgttccatcatatttgtctcaggtctcgtctctccttgctctgccctcgttgcaggagagcctggctcccaggcctgcaggccggctgtggatctccgagaagccactgggtgggactttgttctctgctgcagggggaagctgtgagggagcactgggcccccgccctgagcattagtacaccgtcctgcagggtctatctgaacgctagcccggtggggaggggggcccaggcctcatcatggagagggtggtggtgaggagtaagcccccaggtctgcaccagggtgccccaggacaccctggactgggagtttaggagacctaggacgcatcctggggaagtgaggcaggtgtgtggtgtcttgttctttccgggttaaaacccacagcgtgacccgtggctgggatccccctgttcgtgagttctcaaggaaggggagcctgcagggtgtgactcacacctatctcaggaacacagaggacagagagggatggagacggcctccctctgtgctcctggcctctttctggggagtgcgtgttcagccctgatggcagccaaaggtttgtgccaggctggtcctgcgcccgtgagagggtgctggtctgcagagattggtgacagatgccctggaggaggggagtggagccacaggtgtctcccagcggctgtggccgcgcgtattgccagcagcagtctagggtcctaatacagtgaggtgaaggaggaggtgaagtgctaatacagtgaagtgaattaggtgaagtcctaatacaggtgaattaggtgaattagtgaattaggtgaatacaggtgaattagtcctaattaggtgaattaagtgaattaggtgaagtcctaatacagtgaggtgaaggtggagcggagggccgaggagggccggccttccctctggaagcaagtgtgctgtatgcccacgggggactggaggaggtgggtgttccggtcactgcagttcttacatctttgctgtgtgtgggaggaggaattatctttgtgctctgaagtgtgatgtatatgaggggagagcaaagggctcagactttgatctgccaagctgtgtctcgtgaagtcaggtattctgcaagggaagcttttttcttaagaaacaaatctcatcagtgttcaggacaaggctgtactgttccaaccaccgcagagatggagggttggaggttaaggcgcacaagttaattttccatttgatatttatgttttcattataaaagtaatacatgcctatgaaaattaaacacagagccaaatctaataaataattaaaattgcattctttactccattccacatcccactccgtttcctggagggaaccactgtaagcggtttgtggtttatccttctagagtttataaaaaatacacataagaacatacatacaccgacagagtttccaaaaatgcacctacgtgtcatgacatctctctgcaaaacctgactttaatttgtcttggaaaacttttactacacatagatctacttcatttaaagaaacacttcctcttttatgcatgttctaaagagatacctgtaggcacacacacacatgtgcattgtaagaactgtccgtgtgatagttttggagcacagttacctgattatcagtctactagaacccgagtgtgctttaaagacttgaactgtgtttgtgtgatttggaaagtgtcctagagctgcgctcttatattgaggggctgggcagggtcagaagcagcctgtccaggccaacgcagcgaggcctgtctgggaagattgcaacactggccctcacagctccctggtctctgggtgaccccgcctggcccagatgccgcctcgctggaaggcagactttgcctcctgcctgctctttctttctgtctgtctggtgccgttcataagttcataaaggtggcaaggaggccctaggtgctccgtggcctgggctgcagactccttttccactctggagctgctgtgctctggaacatcccacacggggttcctcccattggaacacaggtaaagggctctatgcatgcacatttctgcgtgttttattgaccgggtcatctgtgttcattagctagcagctcccctgcagtcctctgaagtgcaggccagcagagacgggggcggtggctttcgtctgaccatgcctagtcacgaggctgctgtgtgtctgtgcgtgtgtcttctctcagacactgcctgcctggcacccccttacctcttggtgaatgtaattcaaagcaaaggctgcccctggagcttccaggctgggccccagcgcatcttgctctgctggtttggcattaggtcaggggtcctggtggaactccacggactcatgggcatggtggcactgggagcctagaggtatcttagtcgtcctcacaggctcagcttgagcattgccgtaagtgttcatctcaacacttccatgtgaattggaatcaggaggtgtgtccatggcaacacgtgggcccgagctggatgggaccactgtgtgccttcagtccagcctgccagagtggcagaggacgatgccggggccatggggcaatcctggcacgcgagcaaagggtggggcacatgtgagccacgtctccttttatcgtggccttgtctcccttcctcatctctcccaagtgaggatgaatttctcctgaggaaggcgctggccatggcgcagacctagcgaggatggcaggcagcccccgtgggcaccaggggtgctctggccatggccaggaacttgtggattttccgtgcagatgattgtgttatgtccaaatgatgaaagcttgctttgttctttccaatctttgtttctctcctttactcgtcctatgccagtggctgcaggaagtgccctgaggaacggggcctcatgcctacttctttcttaatcagtggtgcgtggccatggacttcagcatctgcttttcctgagtctaaatgcaaatcatcctgttgcttttctccttttatcacttatcgtcaatagtcctgttaattggtcttctatagtaaaccattcctgtgtcccgggataaaccatatgtggtcatgatgttttggtaaagttctggctggagtcagtttgcaaatgttatttactgtgggtattccatcgctgtgcatgcacgaggctggcctttaactacagggcactctgccttgtccctgacggttgctgcggtgcctccggtgtttgcccagcgagtgaaatgctgactgtggcctgtgaatgagcacctcactggaagttcagtgaatgtgttctcctcggagaggcagacattgaggacgtgtaatatttagtactggcccctgctttactgagtgtttttattgggaagcagggttgaattttgttgtgctgcctgtcaagccttcttgttaaggaatcagatgaactttgttagtcaatttcctcatagcaaaccatccttgcattcatgaaacagatccacatggtcatcatgtatgtgttgactttttaatgtgctgttagccctgtttgctaaattttaaagaaatttttgcattcatagtcatatgaagagcagtggttctcaaacctatgggcagtttacactcttaaaaaattactgagggcctggtgtggtggctcatgcctataatcccagcactttgggaggccgaggtgagctcagaagtttgagaccagcctgggcaacatggtgaaaccccgtctctataaaaaaatacaaaaattagccaggcatggtggtgcacgcctctagtaccagctacttgggaggctgagatgggaggatcacctgagccccaaaggtggaggttgcagtgagttgagatcaccccactgcaccccagcctgggtgacagagcgagaccctgtctcaaaaaaaattattgaggaccccaaagagattttgcttttgagttgcggctattgtggtccttaactggggtgactccctttgtcccttggcggacatttggcaatggcaggagatgtttttggttggcagctgctgggagacagtcactcctgcatcaaatgcacagagaccagggaggctgctgaatcccgcagggcacagccggccctgcagcagagttatcccatccaaaatgccaggagtaccgaggtcgagagacctctaatatggtgttgatatacactaggtaagaaattaacagtgagaacattaaaaaatatttaataattcatttcaaagtccaatgcatacaaaaaagtattttttttcctgtgtcctgggataaaccagcttttgtaaggaaaacccatagtttccaaaattagtaaggacagtggccctgttttctatttttatcagtctctttgatgtctgacctcagaggccacggctgacgtctctctgcctctgcaggcagcctgttgctctgtgtcgtggttgaggctcataaagaaaattatgctgcacaaggctatgcgctcatgaagaaggctgttggaacccccctgcctgcgaggcctggggccccctggggtccttacgccacaatttgagatggtgatttagacaaatttccttcttcccttccctctgcactctttctccttgtgaattttatgtcagtgttgcttcattaaagggattgggacgtcttccttctttatgttctgggaaagtttaattaatgttaaaatagtctattcttataggatttgtagaattcacttgtgaaatcatctgcctttggtacttttgttagaggtaaattttaaaaaactgtttaatagatattttaattatttttatttaaaaattttttaaaatatgagattccatgtagaggttttttttgttttgttttgttttgttttgttttgttttagagctgaagtctcaatctcttcccaggctggagtgcagtggtgcgatcttggctcactgcagcctcgaactcttgggctcaagcagtcctcctgcctcagcctcccaagtggctggtgtgccccaccacgcccaactaatttttaaatttgttgtagggatgggggtctttccatgttgcccaggctggtttcgaactcctggtctcaagtgatcctcacagctcggcctcccaaagcactgttatcacaggcctgagccaccgtgcccagtactcagatattttaattctgtaaaaacaagtctttcttaattctataaaattctataaagatagttctgtttaaactatcttttccatggccacactttataattaatttttctcctagtaaattatccattttatctagatttcaaaatttatttgcatagagatatgcaattatttctgtgagtttttaaaaaatgtattttattttgatgattatttcctcttttgtttttttgagatggagtcttcctctgtcacccaggctggagtgcagtgatgcagtcttggctcactgcaacctccaagttcaagtgattctcctgcctcagcctcccgagtagctgggattacaggtgcgcgccaccatgcccggctaatttttgtatttttagtagagatgggattttaccatgttggccaggctggtctcaaactcctgagctcaagcagtccgccctcctcaacttcccaaagtgctgggattacaggcatgagccactgcgcctgccccccagccctgttttcttattttgtatatttttattctccattttcttgattagcttttttttttttttttttttttttttgcgacagtctggttctgttgcccaggctggagtgcagtggtgcgatctcgggtcactgtaacctccgcctcccaggttcaagcgattctcctgcctcagcctcctgagtagctgggattacaggcatgcaccaccatgcctggctaatttttgtatttttagtagagacggggtttctccatgttggccaggctgctcttgaactcctgacctcaagtgatccacccgcgttggtctcccagagtgctgggattacaggcgtgagctactgtgctgggccttgattagctttttttaaaaactgctataagtagcttactgttttgttgatttaaaaaaaatttcaatttagctattaagattaaaaaaaatttttttccttttatatttattaattccttcagttactttgtaattttcaactttttaagttggaggcttcattcattctcttactgtcttgctttcatttctaaagatgtaaagtaatcaatgggttaaattttcctctaaagcactgctttagttttattagtatggtttctaaaaattcttcagtttttacttctattttccctttaagaggaatatctaagaagataatgtttaaatttcagtgtagaaaaccctgttttctgattttgttactaatttctagggaatattgtttgtattttaattattacttggtattggttgaaaatttctttgctgcttaatatatgggtgctgtttatgaatgtttccatgggatactgaaaaaagaaaggtgtgttctctcttaccaagtacagaattgcctctttctccttatgcactgcttctttaattttgttgtttatatgtctgacagccttgtgtgcttatttcttgcccgcgtgttctgtctcgggttggaagggacacgcacgtctcctgccttcacatgctgagatgggtttctgtagcatccccagaatttctgctgaatgaagtgtgtcgggttatttggtacgaacatatcgaatgactatatctgctctaagaattttagttttagcgttatattcctgatgtctcatttatttcatttggcctgatattttattgtctaatatcaagatattgaacccttttttttttttttgcatttttccagtatatatttatttcatgtatttttaactctgctgaatttctctgttttaggtctttctcttctatctgcagagttggggtttgttttaagccagtgcgaatgttgtccttttagtaggtgattggaggctttttgtatcggtagatatgattggtgtgtttggaccagggctgtggtcattttgtgtattttagggagttgcagataaaatacatgcacgttcgcacacacagcacagacgcctgcatcttcccatgcgtggtttctgctcttgcctctctgggtttttgtttcacttcggtcgagtttttggtggtgttgagcggatagccggggaagttggagtcttgtttgtggccgcctcgtgctcgtgtctgtatctaagatcctcaggctgctcctttttgggtaaggtctgttgcttctctaggaacagtgacggtggcagagcccgtggcccctctctcctgtcccagagccaagctgtttcctctccccactcccgggcaccctgcgggcaagtgaggggggcccactctgccctggcctgccccaccgccccatttgctgggttgtcctcaaagcacacggtaagcacccccgcccccgccccccacacacgtaccgctgtcagccttcttgctcgtcacctccatccagggcacatccgcccctctgggtgctgtgagcctgttgccggcgcggtcccgctgctcctccttctgctgccctgcactgccgtggcacaaccctccctccgggtctctgctgagccctccaggcgctcaggtctgccgtctggttgcaggtgttttatagagtgcagctttacgctcccactccagtcatctccacgttggtgtccgtctgtgtgtcctctctgcctttaagttctgcctctgtgtgacacagtttcacagtttctgtgaccaaaacacaggtttagtcgcttgctgctggcagagtccaattaacaagagcacgtcgggtataaagaaagtgactttattccaaagctagcttaggggaagaggtaaagtgagggtaccactttgcttttggagcagaaagtgggaacttttaaaggtggggggatgtgtggcacacaggggaggaggctggcaggtgggggtccgcataactcgtttcgctgccttatctaccgggtggtcgagttggcatcttccccggcagaactgtgttggggtgttgtgggtattgtgggtattgtgggggttgtgttgtgggtgttgtgggggttgtgggtgttgtgttgtgggtgttgtaggagttgtgagtgttgtgggggttgtgggggttgtaggggttgcgggtgttgtgggtgttgtagggggtgtgggtgttgtgggtgttgtgggggttgtagggggtgtgggtgttgggggtgttgtgttatgggtgttgtgggggttgtgggtgttgtggatgttggtgttgtaggggttgttggtgttgtgggggttgtgggtgttggggttgtgggtgttgtgggtgttgtgggtgttgtgttgtgggtgttgtgttatgggtgttgtgggggttgtgggtgttggagttgtgggtgttgtgggagttgtgggtgttgtgggagttgtgggtgttgggttgtggaggttgtgggtgttgcggcggttgtgggtgttgtgggtgttgtaggtggccagaactttccaggtggagagagttagttcataacagcactttgggtgtggatcaattgttgtctctagaggtagccacctggtggctgagggttcccctggagctcctgagcacatggttaggtgagcttgccccatcggcagtgtccagtgaatggaagggaaaagggtataattgcatttctaaagggctatgtaggaagtggggaacagggggaaatggagacaagagaagagaagagataaaaataatttagaaacagaaaaatgggggacacttggttacattttagctttgtgtgtctctgtaaatctagcaatctggcagactgctggcttttttttttttttttgagactgactcttgctctgccacccaggctgaagtgcagtggtacgatcttggctcaccgcaatctccgtctcccgggttccagtgattctcctcctgagtagctggaattacaggcgtgcgccaccacgcccagctaatttttctatttttagtagagatggggtttcaccatgttagccaggctggtcttgaactcctggcctcaagccatctgcatggctcagcctcccaaagtgctgggattacaggtgtgagctacccctgccggctgacagctaaatttttaaatgctgtttatacttgtgattacttatgtgtttaacttttttttctttttttgtcttaactttctactttaccatcaccatcgttattacttaacattcttttccttcactttcctgcctgctctgagactgggtgaagtttgtttttatttcctgtttctcctactgcagaagtcacacatctgtccatcatttatattcttggagtgtcgtccttaaatgttaggatgcatgcttgatgtcacaaaagtttaccggtgtctctattttctttttttttaaacttcactagtgtgtggggtacaggtggattttggttatgcggacaggttctttagtggcgaattctgagattttagtgcacctgtcacccgagcagtggtacactggacccaatatagagtctctatccctcacccccttcccaatttccctgtccattatatcactctatgtttttgcgttctcatagcttagctcccacttataagtgagaacagtttttggttttccgttcctgagtttcttcacttagaataatggcctccagctccatccaagttgctgtgagacattattttgtcccttttgatggctgagtagtattccgtggtgtatatggaccacgtgttctttattcactcttcggtccatggatgctttaggttggttctgtatccttgcaattgcaagtcatcttgctgcaaacatgcatatgtctttttccgctcatggcttcttttcctctggtagatacccaggagtgggattgctggatcgaatggtggatctacttttagttctttaaggaatctccatgctgtttccacagtggttgtactagtttacattcccaccagcaatgtagaggtgttccctgttcaccacatccatgccagccaaaaatgtggaatgcttcacgaatttgcatgtcgtccttctgcaggagccacgctaatcttctctgcctcgttccggttttagtacacgtactgctgacgcaagcatgggtgtctctgttttcttcccaaatagtgtaaagatcttggagccgggactttggttccatggtgttttcaaaccggctttcctcatgtgtgggtgccatgcgggcgtctgcatctccatgcttggagtccgcggggggtctccagacaggatcctggttgtcacctgaagcttggagaagggacaggagtgcactgcaggcgggggtgtgaccacgtccgcacccctcccagagtgcgaggctgtgtctttttagtccatttcttcccccactgcatgctgggacactcatcatgtcttcagccctgtgtgtgtgtgtgtgagagattgtgagtgagtgtgtgtgtgtaagggtgtgtgtaaagcgtgaatgtgtcagtgtgagagtgtgtgtgtgcgtgtgagtgttgaatgtgtgtgtgagtgtgactcggctgagaggagacagcgcagctgggcaggtgatgcttggtgagtgtgatagtgtgatgtaatcagaaacatactttggtctctggccctggctctgggcacacagctcctacaacctttagtgctgagtgtctttttttttgctaatgaggtgactgtggctggggctccaggacagcctcctgggggactggttgccagggcaactgaccatgtaattagaggttgggactccacccgtggacctctggggaggggagggagcccgcagaggtggagtggatcaccagtggccggtgttctgctcgatcgtgcctgtgtaatgaagcctccacagactccctcaaggacagcgtttgggggcttgcaggctgctaagcacggggaggttcccggagggtggagccctggggagggtacagcagctccgagctccctgccccatacctcaccctgtgcatctcttcatctgtatcttttgtaacatcctttataaaaaccagtaaatgaggccaggcgcggtggctcacgcctgtaatcccagcactttgggaggctgaggcgggcagatcacgaggtcaggagatcaagaccacggtgaaaccccatatctactaaaaatacaaaaacttagccgggcgtggtggcgggcacctgtagttccagctactcagcaggctgaggcaggagaatggcgtgaaccctggaggcggagcttgcagtgagccgagatcgggccactgcattccagcctgggcaacagagcaagactctgcctcaaaaaaacaaaacaagacaaaacagtaaatgtgtctccctgagttctgtgagctgctctggcaaattaattgaacctgagggggagtcattggaaagccaccctgtagctggtcagtcagaagcactggacactcctgtgccctggacaccccaggcctcgccctgtgctcctctccgcccagctgtccatccggatccttcataacaccctttataataaaccagtagacggtgttcccagagttctgtgagccgtcctagcaaatgatcaaactcaaggagggcaccgtgggaaccccagcttagccgggtggtcaggagcacaggtcacaagctaggatcagcatcctgacccggtggtcaggagcacaggtcacaagtggggcagtctccagggcgagccctggcgccatgggattttctgatgccgaaatccccacccgttttggtgagcagagcattctgtgttgagtgttgaatgtggggacagaaggaaagaagagtttgtttcctgcgggtgagactctgggctgcaccaggtgatgagcagccctggagcgcttgttagttttgtggtgcctttgaagtcacttcgctgggtccgcaatcaaaagccggggttggtggtggttcttttgttaatcagtaattagctccacactgttgattctctgagctcttttttttttcccccagggataaagcgttaattacttttttaacacgatactaacctcctgacagcctcccaccccaagctgggtgtctggggacggcgggcctgtctcccccaccaaggtgtggggtgagtgtggagaggacatttcacagctccccgggggtcaccatcagtgtgagtgttgggacattcttttcctgatttctctgtctctcgatgccatttttgtgaaggtttagcaaatacttgatagattgttgtgagaatgtgggcttccttatttgggggagattttttataatggaaaaggtttccttttttggaagtcacctggggacggggatgagtcacccgggggccttggtgcatgtggaggcccaggcttgtgggggagtcgcacagagcacgtgtgtgatgcatttatcagggcctttctcagcctggggacgaggagtggatgtgacggaggaggctcctgttcttgtgggggtggcgaggcgaggatggtgaacacatcagcaaacaggaagcgtggggggaagcgtgcgtgcgaaggagtgcagcccccaggacgctgggccgagccaggcagggacctgcttcagtcctcgaaggaggctgctggcttgtgaccctccttaaccccaccctcaaggcaggcagcgagtggaggagagtctccctgggaccctccttaaccccaccctcaaggcaggcagcacgtggaggagagtgtccctgtgtccctggaagagaggcctgcatggcagggggcacagagactctgggcctgggtcccccccggcacagtctgtgacctgtgaccaaaggctgaagtctgggctggagctacctgctctgtgggaaacaacagtgtgctctgggcttccatggggtctcccagctcaggggctgtggctcaggagccatgtgccaggcagggcactccgtcagtgtagggtctcccagcacaggggctgtggctcaggagccacgtgccaggcaggtcactccgtcagcataggggctgccatgaggattggctgcattttttcgctgtgtgatgtgactggctgcccagtggtggtggcagagccagcctggggtctgggcatggggcgcctgtccccagcggggcgggctctggggtgcgagcgtctgttctgtgtcaggagtccctgtttctttctccccatgctcacacggggtttttagactttgtgaagggtgtgcttcccaaagaaaaccagctgcaggtgtctgtgctggcacaaggagaacaaacccagagagcactgggttctttcctagaggggatggaatccagccaggcgtgccatgaggctcgcagcctcggggacctgtgctcaccagcacaccaccagtgcccagggctccttgtgctgcaggaagggacactggcatgaagtagggggtggggggagtcgctgtctggggggcactccatgtacctccagattcatgcactcggggaccgggcaacgcctcgggaagcagcctgcgctgatgtcaggatctatagtttaatactcgttagtttgtcccctgtgaaaaggaaagaaagattttctccctactgcactctcatactcaacacagaacacttctgccgtgagatgcgtggatgtttccccacaagcagtgctccagggcacccacccaggcgccctccaattccattgagttctgacgcgtcagatcccccagggccagggcccagtcccacaagactgccccactgtcagatgccaatcccaggttgtgatccatgacccaactggctggaagctggggttcccatgatgccctcgagtttgaacatttgccaggacagctcacagaactcagggaaataccagctgtgtctgctggtttctggtagagggtgttacgaaggatccgatggacagccagggggaaaggggtacagagtgaggcctgggggatcctgggtaccagggcttctgtccctggggagctggggtgcacgggcctcccagcatgtgggtgagttcaccaccctgaagtccattgtacaagagttttgagggagcctggtctccagcccctgtccttcctggaggacggcagggggctggggagtgctgtcgagggccccgcaagtctcctgtcactcaggtgagattgaaaggcttgttaggagtaacagtagatgctcccatcctgtaggaaatgtaaggtgttttttttggttttttttgagacggagtctcgctctgttgcccaggctggagtgcagtggcgtgatctcagctcactgcaagctccacctcctgggttcacgccattctgtctcagcctcccgagtagctgggactacaggtgcccgccagcacgcctgcctaatttttttgtattttttttttttttttagcagagacggggtttcaccgtgttagccaggatgatctcaatctcctgacctcgtgacccgcccgcctcggcctcccaaagtgctgggattacaggcgtgagccatcgcgccgagccaggaaaatgtaaggttttaagaactttgtacaagaaccaaatagaacaaaagatgctcctgtcacccttcccactcaggaaattacaaggaatttatgagctttgtgtcaggaaccagggactaagaccaataaatacctgctgcttatcacacagctccccaggtccgctcccgtgaggagcaggctctgcctttgcaagcactttcacgaacagcagatccatcttcctcctgttagcaatcaggcggtcagggtggcggccacttccctgccatgccgcagagaccctgacctcctccgacatcatgctccggccccggcttctgtcctagctgtggctcgctggtctcgagatggctgccttgccccggctgtttcatctgcattccaggcaggaaggtcgagaagggcacgcctgggcttttcttttgaagactccccctgagccccaccctgccgcaaggggcttgggctgtcaccctgtgggctgagtccagggctgccgtgttggagaggcgtgtgggaatgtgcgttttgggatggcagcccgagcctcctacaacttggcagagttgtcaggatttcaagccccgtgtgtctttgaccttttacctgagctgtgtgagaagaggcattttcttgtttctttgcgagtccttcctcactgcacttcagccagggcgccgacacatggtcgttcgacttctggcttggcctcttttgtgagtgtggggcctggtcatatcctcttggtcagtgtctctgtgatgatgagaacgggaagacggccacggtgcccaccctggcaggactctctcccctcgctggcgctggctcagctgccgtgagcggccgtaggcactgtcccgggccctcctgtggttgctcccagccatgctgctggctgcttctgccgtcctggcttgcagagactctgggtcatgcggggaagagggcagagtcctcctccctgctcaggcaagagaggatccagcaagatttcttcctccccaccctcctgcccctcccagtctgggcagcagataaaagccagggccccacacttctgccacctcctgctgctcacacactccagccagggacctgcccccggggtccaacaaggtaaggacagcggggctgcccctgagcagaactctctttcttccctggctgactttgaggcacctgagtcattgtgggtagacaaaagggggagggagaacgggagcttggggtcctggtctcagaccccatgctgtctccaagtctgtgccctctgggctggactcttcctcagccccagccccagcgcctccagctccgctctgtcccctcagggggcattgaccccttgtagccccgtggcttgttgcccctgcaccccataaccctgtgttgacttgggcacctgtgacattcatgcatctggcctgcgcctgtctccagcgcccacattcccacacagagctctgtcaggacgtgccacagcaggactcccaagtccattccaccttctccgtcagggcaggccaatcctcgtctgctgcaaatgtcctgggagtaacaaacccagagctggcctctctggtgtggtggccgccggcgccatgtagctgcctgcccaggagaagcggcgaggcccacgtgtgaggccctgagagctggaaataggtactggatttcagtgtccgatggagaagtctgtgatattttggatatgttggattaggtaaaacacatcgttaaagttaattccacttttctctgtgttttactgtggccactggagcattcagtggtacggtggctgcggcttgccttctcccgctgggtcagcaccagggtacaggtcatctgtagacttttgcctgagacacagacgcctgcttgggacatggactccagctcctcagccctgtcctccagcagcggtgaaatctggagtgttcttgagtaacgcactggcgccaagggggtgctgagccttcgctctgccgtccttggctgaacaagctgtttctctggggaccacgtcaggtaacacgtaggacagcggggtggtccagcagggagggcatgcgcatctgtgtggcaggactgggggtgattttatccgggatcccctggggtggcccagcgttggctcgggtgtttcattctcacagagaacaggcagcttcaggggccacgcgtgcacgagaggagcccccagcccccacggcgcgttcctgggtttccatgctgcggcatttaagaaaagagctctgtgtcgtgctgctggggtagcttccgtgagctacgctggcctttttttttttttttttttttttttttttaataaaaaggagggctgggcatagtggctgatgcctgtaatcccagcactttgggaggccgaggtgggtggatcacttgaggtcaggagttcaagaccagcctggccaacctggcaaaaccccgtctctactaaaaacacaaaaagttagctgggcgtggtggagcatacctgtgatcccagctacttgggaggctgaggcaggagaattgcttgaacccggagaattgcttgaacccaggaggtggaggttgcagtgagccaagattgcaccatctcactccagtctaggcgacagaggaagactctgtctcaaaaaaaaaaaaaaaaaaaaaaagagacagggttttgccatgttgcctaggctagtctcaaactcctgatctgcctgcctcagcctcccagagtgctgggattacaggcatgagccaccagccaataccagatttgaacagtggtcagtcctggggatggagacggggtgagggctgagcattcccttctgaccatgtacctcgtcttggtttaaaatttttacagcaaggtgtattactctcttttataaaatatcattaatttacaaaatcttgtatttttaatttttgtgggtacatagtaggtatatatatttataaatttacaaaatctttaaaaaagaaccccacagagttaaaagttggagtgttttttgcttgaaatgttctattgcagctgaaggactgggtgggtctgtctcccccaggctgtgaggctatcagggctggtgctccaggttgattggagggctgagtttttgtttcttcccagtccattgagacctgattttagaagttagcaaaaggaagctctgtgtcaagtgctcggcacctctctgctcttcccgtcttaaattgcagcaggcttctttccagctagaggctgaagtgttctcagctgatgggaaacctcctttccagtgaagatgtgagataagcactttggttgggttttgatccttggctcctatctgtgggagcagtgactttgtggtgagatggcctgggttttgagtcctgattctgctactgactggctgtgtggctctgggcaagctgctgaacctctctgtgcctcagtctcctcatctgtaaggtgtaagggcttccatgaggagcaaatgtgtggggccacagagctgccaggtcaggcctggcctgcagaggggcctggtgagggcgaccgacgtgcctggggacaggtaccccagcctataggaggccacacaattcaagttagaacgccttgccccaaattctggaactctttctgttggtgttggaggagaacacaccctccctctccaaggagctgggcctgttgcatcctggcagggctgacgtggcacctgctgccccgtgccctgggaagctgaaccagccggacgcagctcccggacgcagcagaaacggaataaccactcggcccaccggaagctgtgatccttgctggacgtggaagtctccgctgcacaataagaagcgacggtttcaggcaggccaagggcatgatggtttcaactccagccacaggggccctcttctccggggcctgcaggtgtacccctgccctgagttcgacacggccactgttttgaaaatgcctgctcagaaacgctgacacagcgttaaggaatatacacacaggcaaggtggcaagccccgtcattccggggggcagccgagttctgtttccccaccccgtcaccccgagggagtgaaatagggtaaggttcaccaagacattctgcagatcagcgtgggcagcagcactctggagggttcagtgcctcccgcctggggacagaggcctctgcttctcccgacccgtaggctgcagtgatccatgcagttcactgctctgtctgaaggtttgacttaggttttaagtgtttttactcagagcaagctgatacatgcgcattttagtaatcgtgataattgttccaacagatttcacgtctgaaactacatcttgtttagaaatcactttccatgtaggagttttccttctgggatgcatttcaagctggggcactcgctactggagacgtcatcggatttactgaggagggtgtgtttgcgtgtgtttggctacctacggatactacagatgaggcgctgtctaattttgtttcacaatgagctgaaatttatccccacaccaatcctctttttgccctacggagtttgtgccttggccccaccctaggtggctccggcaggttcctcagctgtgtgtacccaccacccccaccttgtctgcacgtgactgtgactgactttaggaggccacacaattcaggaagcagagtgtgccaccctggccagacataccatattttgaaaactccgtgcgttctcgttatttcactgtgaggtgcctgagtggcggggccccgatagccagtcccctgtgaccttcagaaggaggccactgctcccgtagtgggtgcctcatgcgggtggggagctctgtgtgcccacctttcatggaagcagggcatgtacagccgtgtggcggcagcaacagcgtaagatggttccgacaggctccagagcacaggagacgggcctggctctgggccgcatgcgggcttgtgtgctttgtttggtttgcatagtaacccgcgccctgtccccatgtggattggaaggacactctgtcagccgctccctgccatcaccacacactcctggagcctctgccaccacggcccgtgctgaccccagagcgagtcaaagccaggagccttcccacggtgggacttctatttttatgtgtgtccttatttgtttattgaaagatgtgaagggcaagtgggattggcacacagaacaagacggtgccgcctgctggccacagcaaagccacctcccccggtcgccgctgtcctgggcaaggcctggtccctgcagaaccggacacggcctgccagagccagtgtgtgtggcaggacaggggacacctgcagaggcttggcctgtggatgctgctccttactgggatggagggagaagacgcggcccacattcctcaggctggagggtgggcaggatgggcaggagctgtggggcccgtgagtgctgggccttgaccctctctgttgaggtcctgcctgtgtcactggcctggggacagctcccgcctggctgagtgccgagctaaatccaggtagacaggttggtgagatggcgctcccagcgagctcacagtgtctcattaacctcataaatgcagcggacactgggctgcaggtgacagacgcgttctctggagcaccgacagcccaggcgtgccggagagagaggacttgagtgactgtcctcctggaacccagggtgccttgtcctggcacttctgtgtacatcatccagccccgttttcacgttcaggaagtcacgaatccacagtgtctttgaagaaagtggggaatagagttatcaaccgtcactccacggagagtctaaggcagagagaagttgggttccccttccacggttccctgcccccggggacacagttgtgggaggtctcagggcagagacgccgcacggtggggtagggggctctggtgccaataccaatgcagcccggttccctgtcctgggcctgccagtgactttgtggtcctgggcaggattattttcagaggcagtggagctagcggggcagagctgtgctgagcgctgagggatcatttgtgtaaagcacctgccactgagtgtgacctcagggttgcccgtgcgacctcagcgtggcccatgggacctcgctgtggtgtgtctcagcaacatcatctttcttactgtccctgttctctgggcctctctcagaccttggggacagcaagctctgccccgtgaactcagaggctgcagctcctgattgtgggtgtccacagtgggcaggcctggcggggtgagggtgggtgggtgtttctgtcgggatgaggggaaggcggggatgaggtgggggtgcacacctgggctgaggggagcagagggaagcagggcttgctggcacattcccagggggctgctgtagggccagtgtcccctcctggggtggcaggaggtggctcctcacggtggccggggtggcccacggcaggccagtgtgcggtcctcaagctgctggtgacaaacgcaaggggcctgctgccctgtcccctcgggcgggcgccacttccttcctgcatgttcctgttccgcattacagattgtttttatggcccccactacgtgagatcctggggcaggggctgtgggggctctagagtgggggtgaacgcacgtctgaggctcatcagggactcagcgtggggccctggggtgggtttgccattgccttttctcgagggccccgtgactggacagcccaactgctctccaggtcagttttcttgtccagacccggggtcagggcggacactggatgagggggagtgtcagtgagggaaacagagaccttttagaaatgatgtcacactgacacctgtgtgctggacctcccacgttccccgcatctggtgctagtgacgtcccactgctggggtgagggaggttaatcacacctggagtttcgctcggtcactggcatgagaaaggaaatgtggaatcttcatggggtttatctgaagaaagattttattgacatcctaaaaacactctattttatgttgtagctctgaggaggcctccaggaaattgaatcaacatactcggttcttctcttttaatatttttgaataaatcattaagttttcatgtccagggaaataatcaggagatattatattcctatgacatttgtttgggcgatatgttcagatgagctttgttcttcttaaccttgaaaaagagatgtggaggtaaaaaccgaagagcgacgtggagtaggacgccacatcggccccgttagtgcgactcccaggcagagaactgccgcgtgcttcagctttgattgacactgagcatccccagccaccggcactgtcgtcagtattcagacagtgcagctcccgttcatcagaaacaccaccagaaggggattttggcagaggtcttatgccaaaatccattatttcaaaataagtaaaaccatgattctaaacattctaggtttgctgtaaagagcatgatgaaaagctccagctatctcaatgttccatacaggttgaggttttgtttccgttctgctttttacctgaagaggatctcgtgtgtgtgtgtgtgtgtgtgtgtgtgtgtgtgtgtgtgtgtgtctacctacctactacctatttgtcatctatctataattgacaaaatatgattgtgtatatggagtaccatgtgatctatgtgtacattgtagaaagattaattaagctaattaacatagctatcagctcaccaacatcgtttttggtggtgtggatgttaaaaatctattctttccctgattttgaaacatgatacgttattgttaactggtcgccacgcagcgcggccgatcacgaacacgtccctccagtctaactgaaactgctccctttgatcagcacctcccctgcccgtccttgcccaagcccccagcccctggtaaccaccgtgctcctcccagttctggtgagacctccgtttccgattcctcgtgtgagtgaggtcgtgcaggacttgtcgttctgtgactggctgattatccacttagtgtcgggtctaccacgtttgtctgtgatgttgccagtgacaggacttccttcttccttatggctgaataataacacggcgttacgcaccgcacgctcgctatccattcgtctgttggtgggcacctgggctgcctccatcgtgtggctgttgggggtgatgctgcagtgaacatgggcgtgccggtgtctatttgacacactgatttcagttcctttagatacatacccagaagtgggattgccggaccttatggtagttccttttgttttcttgagacggagtcttgctctgtcgcccaggctggagtgcgatggcacggtctcggctcactgcaagctccgcctcttgggttcaagcgattcttttgcttcagcctcccgagtagctgggattacagacgcccgccaccatgccgggctaattttgtatgtttagtagagatggggtttcaccatgttggccagactggtctcgaactcctgacctcaagtgatccacccgccttggcctcccaaagtgctgggattacaggtgtgagccaccgccctgggccagtagttccatttttgacttttggaggcacctccagatggtttgtgtagtggccacactgattgacgctctctctccctcacagcgtgccaggtgccttttctctgcgttctcgtcaacacctgttacattcgtctttttgataatagccaactgaacggcatgaaatgacacctccctgtggcttcgatttgcttctccctgatggttaataatgccgaacagctcttcgttaacctgctggctgtcggtgtggctccttctgaggcacagccgttcgggtcctttgctgtttgctttcttgctattgagtctgagcccctttaccctgtggatgctgggcctgcatcgggcatgtggtctgcagggttttctctcccttgcgggtcgtctctttaccctgtcgttccctttgtcatgcagaagctgtttagtttgccgtaatcccagtggtctatgtttgcttttgtcgtgtatcttttttaaagctctgccatctgttttctccatggggaaaggtttgggaatatcgatgatgtcatcatactcctggctgcttcttgacattttccatgcccagcattgttctcagtgcgccccgggggtctttggttctccatagcctgctggcgtccatgtgtttttattctttctttatggttgaggaaactgaggcacagcttggaagcggttggcactggggttaggctccagtagtctcggcatgtagcagcaaatgtgggaggggcagcacaggggaaaggtgaggggagagtcaggagagaaggacgccgcataccagatgcccagaggccccggcggcctccatccaagcacaggcccaagcaccagctgcaagagccagaggacggcactcccgcgcctgccacgagcctcacgtggagagtggacagtggcatggaaacgccagagggttagaactgagcagcaggacggggtctgtgggtgcacgagaggaggcccttggtctggaacagcctggggtccccatgtgctgtcactgtgtggactggccacacctggtgtgccgcttcctttctcagtcatggccagctgccgaatgccgtaccagggcaggggcagtggagcaggtgtctgccctacattgctcatccttggtagtttgggtgatgaggttttgagacctggatgctggagaacaggcagacatgggtgcccggcacgccagctccccgagcaccagctcccctgccgagcaccagctcccatatgccagtcccctgagaaccagctccctgagcacgccagccccccaaggaccagctcccacacaccagccctctcaccgcggtgtgcctgtccccacctcccaagggcggaaggaggggcctccaggcctcgtcttccttcactgtgcccatgctcagagatggtgacttcataagaggccacagaggctccgcaagtccccaggccgtcggctgcctggccctggcctgcgtggcagcgcaacctcgttggtagagtcaggaggctgggcctccactaggatgttatacaggcagcatggcttaggtgtcagagacgggaaaggacctggaagaaaagaactgtttcctttaggccccgtggggtaaccagaaggtaagactaggaggtgtgcgatggtgatggggcggaggaggggacagcgggaacctgtggaggggcgggctcaagccctggtcgtgagcaggatgacattcagatagctgggagcacgaggaggccacgtgcccatggtggaggagccacagcacaaagcaagccacgccatgccacccacgtgctgccatatcacatcacgccacccacgccactcacacgccacccatgccacccacaccacctctacccctcacgtcaccgacgccactcacatgccactcacatgccattgacacgccacccacgccactcacatgccacccatgccacccacaccacctctgcccctcacatgtcacccacgccactcacatgccactcacatgccattgacacgccaccacgccacttacgccacccacgctactacccatgccacccatgtgccgtccaccacccacgccacccacaccactcacatgccacacacagaaccagtgtggaggctggacagggggggcttctcacctgagagcgtgaggaagcagtggggagcacctggcaattctggagagctcagccaagtcaccaaagtgccgtgccgcgctagcacgctttgctgtgcgggcatcggttgtgtcacacactgggccgtgtggtggccttgcgtggtgagggagcaggaggcaggctcaggacacaccacaagagcaaatgtcagagctgggacccaggggcagcaccctccagtagcagcacccagatcccgcctctctccagccccggggaggctgagccggggtccccagctgggagtgcccccaggcgcctggccctggcaggcatgaagccgttcaggaggagggcagggccagcataggccccacaatgtccccacagtttttacagtgagaagtggccttagaggtcaagtccaggagcggcctgcagggcggcctctgcacgcagtactgggcatcggcgctgctgcggagctcggagagacctgaggccgggcccacagatgctcactgctcggtaggggcattctggggcctcagggctgggtctgcctggcatttggggagtctgttattcagacatggaaagggaacgactctcccaggaagggatttttttttttccttatcacgagaaaggcagtgacccaggcgtggggcaggaaggacaacctggcttcatcatcacaggcggccacggaggagctcagactcaggcccacagcacctcagctactctggagattaaggagtggagaagcctcagccagggctcggggcttggggcagtgccctggctctccaggtgcgctaagcaaacagatcatgccaggctttttccctgatggcggctcgagtcggaagccagagtgtagaacagtagcggagcccgcccagctgttcctaagcaaggcctaggccccactgcagggtcacacggaaggctcacatgccgcagccctggcccccacacctgcagctcgggcacccctggggacagccgtggtggtcaatctgctcacttcaaagagggggagccaaggccagagaagtcaagtgacctgccaggaccccagctctgcagcccaaagagtccaggactgaagcaaaagcagggagaggggaggacaatgcagccccagccccttgtgcctgacgtcacaccaggctggcaccaggcctccaaccccagccgggttcctcagcctcccctagcagtggcgagcacggcattgtttaccgggggctgtggacttttctgtgggtgcacctgcagcgttcgtctgtctgagagcagactgctgtcctccgtggggccagtgcctctgccctcctggcacacggccacagtgcctccctccggaagaatggcctgggagtcaaagctgcaagttttagttgtctcctcatgtacaaggatttctccggcagaggaagacacagtgagagaatcaggtggcacgccggtaatgcctgtgttgaaagacctgctcgtgaatgagctctgcccctataatacttctgttctatcacagccgaaaagctcacccgactgctgcccacagagacttcagataccttggcaaaaacaagacatcctttccttttcccgaccgcagctcttggatggaggcgcagaggcctagtgcttctgagtggagccatgcctggcgccagcctggctctcccgtgtcagctccgcctaaagcggctcccaggcctctgtgcctcagcgaaaagggcttccctgtgtatttgcaactgcacggcctgtttccttgccctaaaatttgttaaaatcttcaagatgtgaacaagcttttttcctcttaaaaaaatgacatatttagaagtaggctgtgggtccctgggatgctggttcccccaagtatttttctctaatagaaatctttggttttgtttttaaaaggaattctccattcacgtactgttctgaatggtagccatgtttgctttaagataaaagaacaccccgcctgcaaacctgagtggggctggcactcctgggtgggggaacgttgaccctgtggcttcctgtggccctggagaaaactcaggcttgctgttatcacaggggtacccatgagtgacttttggattttgggaaatgcaaagcatgtagataagaagttggtccctagatatgtgtgagtcccaaaggcccactgggtggggcgctggtgaattgagctgaaagtagcagaatctgccttgagctgacctaggtgggaagccccaggggtcagctcctctacgctggcctttgcttggcttggcggaggcgcgcaaggcccctgactatatctgttcctcctctgggccaccctctaggttgctttccactgcaggcctgtctccttgaggtgacatcgtggctgcctctgcaccagccatcacaacttgatacagataagtctgatgtcaggaaaagggagttttttttgttttgttttgtttttctggagacagggtctccctctgtcactaaggcttaagtgcagtggcgcaatcgtggctcactgcagccttgaactcctgtgttcaggtgatcctcctgcctccgaaagtgctggaattacaggcgtgagccaccatgcctggacaggaaaagggaaatttctttttgcaaccttttgtcaggggctgaaacctttctggaagctccaaaagactcctttctctctctcattaactatctctaaggcagtcattaggacgcatcccatgaaaccagatgacttctgcatagccattgccttctatacctcaggcaggttcttgttagaagaagtgccaggcagaggttgtgtgggcagccagtcatatttgcatattttggggtgactgtgcagacagtgctggaccaaggaagttgtctgggtcctcgctgcagagggaggaggaagcagctcacacgcttgctgttgtctggtgggagggctgcatttctcctctctcccccactttctctctctctctctctctcacacacacacagacacacacacacacacacacacactcacactcactgttgggtttcttgggctgctaacaggattaaatgaatgtcttggttccatgatgtgcatgttacgctagagagctaagttagttaacatcgctcattgggatagaaggaacgtactgaggaacgtactgaggattagaagtcagaattcttgaatctgcaaatctttttttttttttttttttttttttgagacagagtcttgctcttgttgcccaggctggagtgctcactgtaacctctgcctcccgagttcaagcgattctcctgcctcagcctcctgagaagctgggattacaggcatgctaattttttgtatttttaatagagacagggtttcaccatgttggccaggctggtctcaaactcctgacctcaggtgatccaccagcctcggcctcccacagtgctgggattacaggtgtgagccaccgtgcccggcctgcaaatcttctattttgttcagacactaactccagccctataaatagtcatccaatacttccagtaaatggtgcgcctcatattgatctgcctggttgccttaccgtgtttgttacattgctgtgtaacgagttacccacaaacttagcagcgaaaacagcagacatctattatctcacacagctgcggagggtcaggaatccaggagtggcttagcgggcgattctgggtgtcacgtggagtcacatggggtcaatgtgttggccggggatgcagtcacctgaagccttgtggggggaaggaggggctcccccaggcctgggaaggctgcggctgccccatcacgctctctcctccaccaggttcacaggttcacagaagtaaaggctgagcatgtcaggactgagctgagcggttcccacctctcagtccacagtttcccacagagcacgcaggggccgcaccagggctgggacggggctgcgaccaggctaggggagcatcctgggcaaaccctgctggggacaggttcgttgtgtctgatgccgtgggagatgcacgagcagtgactttcactttatcccactgtggccccgtgaccctgagcgagaatgcactggccgggcctccagggggcgctcccttaggaacaccccatccccgtccccgtgtgctgtcgagggcctctagcgggcgctcccttgataacaccccacccccgtcgctgttgttgtcgggggcctcccgcgccccaggaggtttcccagggcgatgctctggtccctgggtcctttgatctcatctccctagtttagcctttgaactccatttcagattgagaggtttcaggctggagtgacatggagggacgtgcctgacttctggaggataagaggcggcccaccccacagctcttccagcgtgggagctctgaacatgggacccggagcaccaccgtttagcaaaccttgctgcagtttggagagagtgtcgcgggcgcctggcctgtccggcaggctgggtggctgttctctgttgagcccacagccatgccccacatgcaggacgtttgcctatcacttggaggcctttcagggatcttgctagcccacggctgagcacagggtagacctcaccaactcacccacaacctggccccttgacacactggtgctgtgaggaggaagatgtgggcactcttaggtccctggtcctaggggtctgtgctggggtggggctcgttgacctgcatcctggctggccctgtgactctgcctgtttacagtgagcagctcctggccaaaagctgcttattggattagccggtgccccgacggcagagcccgcagctgtgcgcaggaggacgaacctgtgtgtatgtcctgcttcagcgcgctcctggggtcccttgagttggtctctgtgactagaaggacagtgctggccacgcaggtggcaccctgggggtgcccagcacccacttcctgctgagcagatgctctgggtggcaacggcccctgccaagcctgggcagctcaggccaggtcctaatccctccgcttgagctcggctcctcaccctttggccaggctgacacctgctccccgcaggtccttctcgccggcttcaggcagcacaggaccgagggctgaagatgctgagcagctacccggcctgcctcttctcagggatctgtgtggccctgctggcggtggctttggcctattacttctactggtgagtgaggccggggcccgggggcctgggcagtcctgggggcctttactgtgtgctcccctcctcttccagccctggaccgttctctgcatgtcaacaaaccctgcctagccctttgcaggggaactcctgggaggtagggaagcaggggatggcaggaactcattctgatccctcctggggtccttgggcagctctcccatccttctgcaaaggggtttttgttcagaacattcctgaaggagctgagcggtttcataccatctgggcggtgtttgtagatgcctggcatgtcctgggacggacaagtgcctgatgtatgggcacagactcccactgccccccaaggcaggtgctgtaggatggctgatttacatggtgatctgcaccctgagcagaaaatgcgtagttaccatcaaagtggcgctgctctgtcacacccattgcctgatgggctggtttatggtgatcgcaggcgatttcccagctgcccttgaccagagtccgtgccggctcttactgcagaagccgagaatcagcaggtgtcacagatcacgctggcctaggatttcagagactcggtcccaaccccgctgtgtctccgggctgggattagatggggtgtttgtgctccaggcctccagtgctcgttggtaaaacgggacactgatgccgcctgctgtttctgcagagggtcaaagggcacaagatgcgtgccagcctctgtccatggggtgtgtgatgatggtaccaggtggtgcagggggcagctggggggacccaaaaaccccaagtctgggtgccaactttattttctagagccggagaacgaggtgatttcctaggaagagaccacagctcccctggaggttccacgctagactgtgtttgtttttcttggtgcacacttggccaggagctgcttctctctgatctggaagctttctcttctatagatccgattaatgcacttccattgctaacagcggggagggtcactgcaggtgacacaggcaggaggatgcccagtcttccccatgactcagtttatgtaaaaacgatcaatactatttacaaagaggtttacccagagccaaaagacagaatcctaaggctgaggcaggaggatcccttgagctcaggaggtcaaggccacagtgagctgtgattacgccactgcactccagcctgggcaacagagcgagaccccatctctaaaaaacaaacagaacctaagtgtggaatttaggagacaaattagcttgggatttggggcctctgagagtttgagcaagggggtcggtcattggtgagggttccaaaaccccaggagcaaccgctcactcatcctcaacctggggctaccgcgagtgtgacgggggccatgtatacagggcaggctggccccagcgagcgggcgactctggcagcttccacggaccgttcctggcgcctgggcggagaaagggtatcaaatcatttcctgggattcgtggctgagctatgcagtttcacaaatgctcaaaatgatgaaagacctattaggtgttgggaaaagagcgcctctgtctgggaagagtgccgcattgcgcctgagcagctgctcgtaattggcttatgccaagcctctcagcttcagcctgctgaccaggtggcaggggactggctgtgccacctcctcacccacagcgtttccaaggatgtgcatttctcctttgccctcaggtcttcagtaagttagctgtggaattcgaggcctcaagtggtggcctgcgccgtggcagcgtacccacaggtgccatttagtggcacttgcagtacgacctgggagcttccggaacctgtgggcttgtgaggtccctgttgatcctgtttgacctggagggccacagaggcggcttggtttttttgtggggacagagacgttgagcgtcacggtgggtgctaggcctgtaataggagcgattctgcattgatggcaccacgggtccagggaggcctcgccagctccctcccagagcaggaaggcgggctggccactcaccaggagcctgggagtctggcgtccttcacgaggcgctcctgaagcacctctgcctaccctgcattcgccacacgtgcccaggtacctggcgacggacagcagggagcccacaatgccagctcttcctggagacgcccgcccctgcggtggccactggtgttcagtatgtgactctctgagcgtggggttctagaccaggaaccctctgtgctcggtccacatgaaaagagcagcttctcgttcatcttcagagacctgttcttaatgggcagcaggggctccgaatgctgagaaaaccccacaggtggcagctgggtgcctggccctgcagccacgcctgcccgcggtcaccctagggtgcagcggtcaccctgggctgctgtggtcaggtggggtcttgtctttagcccccttcggtggctcacttggcgggaggagggtggcacggcggtgccattgcctcatctgggctcagggagacaaggcaggacctctgttctgtctcccgtcacctgtgttgtatacagagaaaaagccgtcctggcagccctcagagccccttgcctgttggggatggaggaagacaggcctcggagccttgttcatctggcatttccacagcagagggagggaggcccgctccccagggctgggtggccagggtgcatggtcatgctgggacatcattttctttttttcttttttttggtggggggcgggatggagtctcgctctgtcgctcaggctggagtgcagtggagtgatctcagctcactgcaagctccgtctcccaggttcacaccattctcctgcctcagcctcccgagtagctgggactacaggtgccggccaccacgcccggctaattttttgtatttttaatagagacggggtttcaccgtgttagccaggatgatctcgatctcctgacctcgtgatccacctgcctcggcctcccaaagtgctgggattacaggcgtgagccactgcgcccacccgggacatcattttctacttgtaaaccagaaacctccttcctccctcctgccgtcccataggattttatcgatcacctactgtataccaggcactggctaagccctgcacgcacagtggtgagcaggcagtcctcaccctcctggggctcgatttcccagaaccctcaagagaaagccagtcctcaggggtcagcaagttccacattcagcttcagctttcggccattcctgccgccaggccacgctgagagtctgccggggcacctcggttccctgcgcctggcctgccaggcctcagccgccacggcctgtgtcacggaggaagggggctgcagctgcacccccgggaggggaggttggagtcggggtggggcgggccgcgtgctgttggtgtagggtgggcgatggcagtagtggcagcttattaccacatcaggagaggccggagcgttttcagcaaggtcagaagcctgcgctgtgtttaaaatcagggcgagagggagacagggagggaacgttccgccgcctaaaccactttcccgccgcatctttcacctggagtggaggggcaagtgcctgggcccagtggtggcagcttcgggagggttccatgaggctgcctcgggaagcaagggtcccggcagagctgggtgttctcctgggccccctcaggacagcagcatccacttcaggcgccgcctctctaaggagccacacctccctctcgggccaagtatggaaacgagccacagcaccacgtgtgctagggccccagcatttcacccacgtggcagaatctgtgccccaaatgtcacagcccctccccacctcggaaatgcaggctgagtggaggccccggccctcgccactctggagcgatggctatttcaggctccaggaggccgctgagtggttcccgggctggccctgcattgcggctgggcaggggccacacgtccctcccccgtgggccctgggtgcctggaatctggagcagagagagagagggaaggtaacagcgtggcctgtacatccctgcctgcaggcgctggccttgctgtccctgggtgctgcctgtgtactccagggcactctctttcctggagaggaggccgcgggagtcatcgcggggcagatcctggaggccagcaaggccgcccctcctcctaagtggcactgattgacaggggagaaagacagaggcttgttccccagaaaagcacagaaaaccagccttgttcctcagacaggagatgcatgtgccgggaggcaggcagggggacggctgtgctcggcctctgtgcagtgggattattagggacaaattccagaacaaaacttgggtttcatctaagctttttggggatttggggaaagcagaagaaaagagggagcccaggaggaggtcaatacaccgtgccaggaaatgaggaaaagctcagatgtgcagtgtcagcgcttttccatgaatcacctcttacctctagaacagcaagtgcgggaggtgtccaggtgcgggggggccacgtgccctcaggggcttccctccccagcccgcctggagacatcatcactgactcagctccggcaggcaagggtccctcggggtctaccactgggattgacgccagcaagtcggaccctttctcagaagcccagagggagggcagagccgtagccacagtttggaggcatctgctgggctagtgcatgttttaacagcacctatgacaaggtgaggcagcatgggtggccctgcaggtggcggtttgcatatgtgcacatccagccagctccgttttccagtctggggactatggtgacaggaagtaaaaagcctgcgatttggcctacggggtcccagggtcatcccggggtcgcaccttggctaccaggcttgagggttctgtgtgcgatttcaggagagacacacagcccatcgcacacctgacagttgtcaccctaaagaaaattcggctgaactgtgcacattggggagcattttcattcacattacacatttcatttcacttcacgttttattggtttgagtaatggtttagaaactatcttttacttcaaaatgtttgtgcatctgagattttctgactttatatctggacagggcgccgtaatggtagacgatggccgaggttcagggaaccctgtttctgtggttcaggacaggtccagcctttctgagccctgtccccgcagagagccccctttccaggcacccgtgtcttgggtcgccgctggccctgtgaggtgacactctgcagctcttgcactgtccaggccaagggtggctgttctgaaacctactcggtttattccatcttgaatcaatgcattttttcaagtccgtgcctcagggtgcctgtagaatgacagatgtggcatttcaatcggtaaataatgagtacacctttaaggtccaggcactctttgtttagaacattgtggaatgcctacatcatctcatgcttgcacaggagcgtggctttgtcagaactcatccccaggcagccctgtgggcacctggtgggggctggacaggggtcacgaggagaagccagcaggagggtggtgggccctccaccttgtccccgcaggactcccctctctgcccagacacactcagcctccaccaggactcaggggttccagccaagctcctcttaccaacgatgccccgtgactgccccagggacgggagggctcaatgccattcccctgcaggccctgtctctccccagcttccagttggttgtcctgcagcctcaggtctctgatgggatgaagcaaagtcgagaacttacggtttgtctggctttattcttgtgagagtgggagtgacaagctctgtacatccccagcagaaaccagaattccacctcctacataactttgtaaattgcaaaatataatgaaaagtgcatgaggccaggcacagtggctcacgcctataatcccagcactttgggaagccgaggtgggtgggtcacctgaggtcaagagttcgagatcagcctggccaacatggcaaaatcccttctctactaaaaatacaaaaatcagccaggcgtggtagcccgcacctgtaatcccagctacttgggaggctgaggcaggagaatcacttgaatccaggaggcagagtttgcagtgagctgaggtcatgccactgcattccagcctaggggacaaaacaagactccttcttaaaaaaaaaaaaaaaagtgcatgagacattgatgaccagtttaatgaataagtatgcagcaaatatccatctgtttctatagagtaaaagtagttattataacgcgtagttcgttgtaagaaaattatgtctaggtcaacttagctgtgactgttttatgtgtgcatgcatgtatgtgtgtgtgtgtacatgggcgtgtgtgtgttttggagtgtggtccccacaaatctgccacccttggagaatgctcttctgccctggtgcatggctgtgccctagcatgggaagcgcctgctgtgtcctgcaggcccgcagacttgtcacaggtccattgtgcagtcatcaggccctgggagctttccacatccctccacctcccacccaacatcaccactctccggccagtgagaccatcacagcaccccagaggagacaaattctggagctcagagagctggggtaggtgacgggagggtggggggctggaggtccttggccagcagccttcccatcctgggccaccagcaccctcatcctcccctcgtcctgcccagctccacctcctccctgccctcttcctgccagggtttgcagtttacactggcagtgatgcagtggcagacacaacttggggaaataactctaggaccctggtctttagttccgattcccggtgagacagtacctggcggggagcttctcgccctcttcagaagtggcctgggggccctggggctactgatccagcccaaagctgcagtcaggagagcgtgcagccgtgtgggtctcataagagaggccgaccagggctgcccaagcggagcttctgtttggcctctacctgctggagtgacgcccccggcatctccagcgaggcctggaaacgtcgcagtctcctcttcactgagtccaaagtcacttccatctcgggcccgtccagtgtctgtcggggccttgattctgagatgagattgtttgctgaagtgctccatggactctttcaggagtgacgttgttctttcaggaactgtaaacggaggtggcatgtaaccagtgtggactaagaagccatgctgctgtttcttttcttttcttttttttttttttgagacagagtttcaaaaaaaactgcctcccgggttcaagtgattctcctgcctcagcctcctgagtggctgggattataggcgcctgccaccacacccggctaattttttgtatttttagtagagacggggtttcaccatgttggtgagaccatcaccatgatggtctcaagctcctgacctcaagtgatctgcccaccttggcctcccaaagtgctgggattacaggcatgagccaccgtgcccagcctatgctggctgtttctcacaaatgtatattgaatacgagccattcgcttagaaaacattgatcaagcatctgtattctatgccaggcccacgtgagtaagagtaatagctgttgatgatgtaagctgtgtttttggccaaaggtaacagagatagtgatttaaacaccgttacctcttgtcttccccgcctcttgaagagggcagctgctggtgtgacctcagctgctccccagaccctaaggggatctgggaccttccaccttctaccaacggtgttggtcttctgtcctcacgcctatggtttcacgctcccacagtggctcctgcaccttcagacactgcctcctcaccgagggagggaagaacgacaaaggtgatgaccagaggtatttgtttcttgtcttaggaaagcaaaagcctcccttaaagcccccgcagacttctccctggctggacccagggcacatgcccatcccatccctggatcacttgctcaaagaggggatgggattacctttatggcttagatctggggctgggcttccctcccatatccaagggtgagcgctgccataatagcaggaggttctgttaccagcaaagggggtagtggcaggtaggtaactcacagtgacttgcatgttgcaaaaggcggggttctgttatccggaattggaggagtggttttaggtatgtcatataattatgcctttaaatccattggttgagaaaacaggcaatgctaaaagattctcatgaacctagcagcggttttaattttgtattttatttattttatcagtatctaaatacaatagaaatataaatacaatagaaatggaatggatcatgtgagatgtgtgttgttgacgaacgtgtagtcagtgcttcatgcacatgggatccaagtccccaaacagtggctgcagatccacaccctgctccaggtgctgaggtgccccagacagctgctcctagtcagtgaagcattgactctttagtctcaattgttggtctgcatgtctactgataagccggtactgtgctgttttaattattgaggctttctagatgttgtagtgtattttagggctattttcttgttctttttcatgattttcctggcttttcttccctgtttagttttccatatgaactatagaatcagtatgtctagttctggggctgggggggagcttttgctattttaattaggattcagttatatatttaggtttatgtatcatttacatattactatctaacaaaccacctcaaaatgtatcaatttaaaacaaccatcatgtcggggggccctcaattctgtgggtcagcaatttgggttgggctcagcaacatggttcttctgctggtttcccctggggtcattggagtggctgtcgtcagctagagctgcctggagaacctcaggtggaatggcccatttctggtccatttctgctccatgtgggaccaccttctgtcagactagcccaagccaccacctctgatggccacaagggtgtaagggagtggcaacgctctaaagactgtcttggaagtcctgtgacaccaatcccaccacattctattgatagggtgagccctgaagtcaacctgggttcaaaagggtggggagtagactccatgtcttggcaggaggagctgcacgttactaagggcatgtgttcagggaaggggtggttgcagcctggtcacacggggtttttccatttgttcagctctgcttttgtatctttcaagatgttctgtggtttcctcatagaggctttatttcctctgaagcttttgtttaggtattttctctttcttattgcaatctgcgctctccttcaagacaccttctgcttttgtgtgttcctgtggaggggtggtctgctgggcccctctccttggctcctgaacacacaaggggatcatatatccatatcctcccaagctgtaagcacttgcgctgggctgcaaacttgcatcctacttgccgtagaggacagcccttcccctaaacttccagtttccccctctcccacctgcctgaaaggcaccagccaggcagtcttggaagcctcgtgttgaaggtggtggagcccccagagcctgggcccagatgaccatgtgggacagagctgccagtgacctagagccattaagagagcaagagataaactctgtgattgtcttggtctcttctgactgattcggaggccactgcagtctgcatgttgtacattattcctgttagcatcactatcaactctagttcctgttgtagtagatttggattctcctgggtattgaggctacacaatcgtctgcacagactgacagtttcacctcctcctgccagacttttagtctcctgctaattccaaatgctgataaggttgggctggcaacaatttcatatttttcaggcttatgaagaggtaaggtggtctctgtaagtgaatttacccaagaactgaaatttgccctttaaacctcaaaataggattgtgtttgtttcatctaaaattttagttgaatgcttagtagtatcttcgctgcttaccagacttctcagataatgtggtaactgtgacgccgccctctctcagcattcggacgagatcagcgtgggccacagtcaccgcattgtgccctcatgcgtgatgtcagagagcctgcaaccgcgcccccgctgctcagtggcctccaaggggcctcaagtcctgggctcgtttctgccccaggtagtgctgtcagcggcatgcctgccttctgcaagcccctcttccctgttccccagcccgcacttccaatgagctgtgggccaggaaaccagcccgtcacacttgtccacgctgcgtttaaagcgggaggaaggaggacccaatgcagggcccgaaaggtccactgtgagtgaagtctttttccttatgggacacctaggctggcttctcagaaagtgtgtgcagtttatttccgggttcttggcggtgttctgaatagtaaacgttgccacctaaatgaagaccctttgagatatcactgcgtctctactgttcctgatggtggactttctcctccagcgtctgctgacagtaacagtggagctttccccagcacccaagagcccggggctcaccgtggtcccctcctgtgcagccagcacacaaggccctcccgtgccaccacctcgcaggggccaggtctgctcggcccactacaccagagcccttgggtgcggggtgggcgggacagagaagaggaaggggggaaggagggagctgacagccgtttctcagttccccattatggacttggatttggatcactgaaatccatatggaactaagaagttatctttatcccacaactcaaaactcctgtctagagcatcagaaatgatgtgcttttggcatcctgaaatgtctttctcctccgccaactgctgtctgctgagagctagccttgctctcggaagggcggcttgggcagggcaaagggagaattccagggtttgggagcatctgctgatcccagaatagttgccagtggtgacatcttcttcctggaccccaggacccaaggacagcaggtcccatcccagctctgcccagctcctgcccctgcacagagcaggacgccagctggggtgggcactctgtggcgttttgggaagatagtgctatatttcagaggctgtgccatctcctctgggggatttcagcgctggtgacagaggcatgaaaggctcatggatagacaaactggtgtttacccctcatagaaacgaagttgccgtcctatgtgtgcagagaaaaccagggactcctctgttcagaaggaagaaatggaggggcctggtgggcctggcagcggtgcggaggtggtgggctcggaactgtagtttccattccataaaaaggcgtcttcggaaaggttggggattttggcaaagaaggggggtctctggggagactgcatgtgggtgagatcctctgcctggccggttttggaggaagagggtcacagggaccagcgacggggaggagggtccacatgctgcagcgaaggacctggggcaggcagggggtgggctggatggcggaacacggggatgggcccgtacctctccagaactacggacctgggatgaggcggcctgtgagtgcgattgggctgtgtgacggcaccagaggcggggctgcagctgcaggcttttgtcgtcctgtggtcctggaggctgcaggtccaaggtcaaggattccttctgaggcttctcacccgggctctgactgcaggcggtctccctttttcataaggacaccggtcagatggaatcagcgcccaccctgatgatatcatttaacttaattactgtgttaaaggccctgtctccaaataaggtcacatttcgaggacctgggcattacctttgtggaaggaactcagttcaccctaacaaaaggtggcagaattgggtgtgggcgtgtggggctgggctctgattggcaagcagtgctctggccctgcccaggcagaggcagcctcgtgcctcacctttgctcccctgatctaagaaggtgcacaccccggtagcttgtgcaggggccaggacaaaacccaagaagcagccatcacgccccaggaccaagatgtgctggcgccaggcttccgggcaacctaaatctgttgtttaatgaagacgcgctggcaccaagcttctgggcgacctaaacctgttgtttaatgaaggggctcagaagcaactcagtgtcctcagtgtctcggtggcatctgagcagccatgaaaaggtgccatggggactggagaggcccactgtcacacctcccagccccagccccagaaatcagatggagccccagaggtcccacccctgaggtcccaccctgtgtggctcttctatcccaggcgttctccaaggtccccagggtgctgggggctgcccaggctatctgctgcggtcagggtgtcagtggtgccaccataaccaagtgaggcgaggttccacatcgccggccaagtggctttatgggcctccagtgggatgtggcaggaagtacccagcggctctgccatgcattcttgaccagaaatgttgaacccgagttaattgtgaggaaacggacaaatccagggtgtggggcacgccgcagagagctgccttagccgcttcaacaccatcaggccagagtaggcggggagcgtctcggggaaaggggacagagagacgtgccatccaaatgcatgtgtgtcctccacggggccctgcatccccgcagctaggaaggtcatctggggacagttggtgaaatggaaacagggacgggatgttcggcagtattctgtcggtattcatttcttgggtgtgctcatggtgtcctagtgagcaggctgtcctgattcgtaggagatgtggacggacatggagggagtgccgtgacgtagcccaggagacctttttagcttaaagcctgtgcataagaaataggcaagtgagttttagatgttcatacatatttcattgcagaatattagtttagggtgatcaataaaagactttcaagcctaatgttaagcaaaagagacttttaatatattccacaatgataaaatcctgtggaagaagggcagtgggaatgcagattccaggagcaagtggaacgaagccagctgtccagaagagctttttttgtggggtttgaaaacaggtgccaatggtggctgtcaaatcatgatggcatttaggttctactagctacattggagagaaagaaaaacactatgctttacagagtcaaaatctacaatatgccagactttacaccccttgcatatttaaacttgggcttaaaaatgtagaagctggctggttgcagtggctcatgcctgtaatcccagcactctgggaggctgaagccagagaatcacttgagcctaggagatcaaggctgtgtgagccatgatggcatcgctgccctccagcctgggtgacagagtgatattctgtctctataaataaatagatgaaaaataaaaaataaaaatgtagacgtcaacttcacattgtctggggatgcataatttcctaaaaatcgctctcatgggctcacgagcaaatgctctagggggccactgagtccaggcccctcccaatgctttcctgctctgccagcccaaaggactttgaagctggaggcggggaccggtgtggccaagcagggcaccttcctcaccgtcacccttctgcagggagggaggtggcctctgcctgctgccattggaggtttgtgcagtcaggtttatcaaggaggtccaggcgggctgggtgtggggaggtggaacagggtacctgcgaggtctgtgagtgaaactacactgctggctggacagagacatggcaatgacccagggaaaccgtgttgagcgctctggtgggggcaggcgggcgggagaggcccctgagttccgctagctggaattaagcaggtgaacagcagatgtttcttggaatggagtctggtccatagtaagtgatgaagatgtgttttgactccgtatctaggacctccaggacgtagaggttgatgatccgggcaggtggccttcagcgagggagcacgtcaaaaggctgtgggccgtgcagacagctgggggacaccgtcccgggtgtgaccttgggccacacggcagggtggtggacttgctcctagaattgggctccagggctgaagccagcccctctgatctggcactggccggctccattcaccctttttggggcttactgccgcagagacttcctttgaggagagctggacccaagacgccagagttccgggggcactgagtgctgtgtggcacccgggccaggagaaacatgtgccagagggcaggcgtgggctctccggggagtctctgcgtagactttctagcccagaggttcaggtgatggaccagagactggccgctttgtgacaccgaggacggttgataaagtggattctcgaggggaagctgcatccacacagaggctgggacgtgaatgtgcatcacggctctatctgtggcccccaaaggctgggtgccagctgcctgtcggcagggagcgtatcaccgtggcacgtccatgccgtgggggtcactcagcagccacggatgcgccctgggtgctgtcccggggccgtctcagaagcaccgcgctggaccggctgggccagatgccatgggattctgtgtttgtgaacctctagaaaaggtaaattaacctatagagctggaaagctgacctgcattgtcaggctgggtggggaaggacttggatggaaatgttccctgttgcagtgtggtggggtcacaggcggcttagcttgtcaacacccataacgctatgcacggacactcggcaaacccatcttaatcgtgtgttatttattcctggatgaagttcttttcttttttgagatggagtttcactcttgtcacccaggctggagtgcagtggtgcgatctcagctcactgcagcctcctcctcccaggttcaagctattttcctgcctcggcctcccaaagtgctcagattacaggtgtgagccaccgcgcccggctgagaatctgatttttaaaaataaacgtcatgactgggtgcggtggctcacacctgtaatcccagcgctttgggaggtcgagttgggcggattacctgaggtcaggagatcgaggccagcctggccaacatggcgaaaccccatctctactaaacatacaaaaatttgctggacatggtggtgcatacctgtggtcccagctactcgggaggctgaggcatgagaattgcttgaacccaggaagctgcagtgagccaagatggcaccacagcactctaacctgggcaacagtgagataatctgtctcaaaaaaaaaaaaaaaaatcagattcctgtactttgcgccgtagcaacggaatcagcaggtctgctgtggagcccgggcatctgcttctcggagcatcacagctgatgtgctggccctcaagcaggcttcttgggaccctggttcttctgggccagtgtggagtgatgtgtgcccctgggtgaggaccacctggtctcctggggctctgctgtgtgccaggtgggggccaggtgatgggctgcagggcggcccccaccctgtacaactcaggatctggtcgaatatatcgtctctagctcaagaaaggcgttctgaaacagcaagcctggtctgcccagcgtgtctgaggctctgctctaaggggcccctgcccaccctgggggggctgcagtgtgtctgggcgagcactgacttctgagcctcgctatctggactggcactggctctactgctgactccctgtgtggccccatatgatgcacgaagcctctctgtgcttctgtttgctcacctgtcaactggggcagtgatggcatcctgctggggtcatctgagagtctggaatgcgtgagaggtgttcaacacagaccgtggaacaagttaagcccataaaaagtgtttttgttgcccccttgtcttttctgtcctttctgtctagggtattaatttcctgttgctgctttaatgaatcagcccacagtgtgggggcatcaaacagtacaactccttaaccccacagtgtgtggagtcagcaattcaggagcgacttagctgggtgctgtggggttgcaggtgagctgaggccagggctgggctcatctgaaggtttgaccagggccagagggcctgcctcccaggtggccccctcaggagtaggaggtcagccccttccgcgcaggaaggacctgccgctcacacatccttgtgatgtggccatcctgggagcagagccaggcagaaactgtcctttttgtgacctagccttggcaatcacgtagcacatttctgcaaggctgttcatcagatgcaatgaccaagtccaggccatagtcagaaagggaagaagacccctccacctttcgaggggaggagcgaaagtgtttcaggcccattcctaaaccatgaccagagctcttgtccccacggtttctggggagccaagggcccagtgtctgggagaggtgacttttaatgccccataggttgagaacgtccaagggtggtgggagtgacactggcatctgtggcccccgagtgccattcaaggcagcgcctgcaaatccctgagaggcagagggtgggggcctgtatggagggcgctctgtggagtcgggacagggggtttcatgggcgggtggggtgggcgcccatggagagccttgctctgggtgcaagaatggccacagtgggggcagctggcggtgtggaacaggggccgccctgggaatgtggaaggccagctggtgccactccagagcccacccctttgccccatgggagtgcactcagtgcccttccagaggaccaagtcaggggttggcagcaccgccagcctgactgccagggtttcccctccacacggggggtctcgggtttcccctccacacggggggtctcgggtttcccctccacacgggggtctcgggtttccccctccacacgggggtctcgggtttccccctccacacggggtttccccctccacgcgggggtctcgggtttccccctgcacacagggatctcgggtttccccctccacacgggggtctcgggtttccccctccacaggggggtctcgggtttccccctccacacgggggtctctggtttccccctccacacggggtttcccctccacacgggggtctcgggtttccccctgcacatgggggtctcgggttttcccctccacactggggtctcgggtttccccctccacacgggggttgtagggccgctcagtaggagtgctgccaagagtggaggggggccaccggcttccctgctgaaactgtgagacgtgcgtagaaggaaagggggagccggtggagcccctggggagtcgctccttttgtgcaggaaaccagaacagaaatctttcacgcttcaaatacgcacacgagtgtgggagtgaaaagcattgattcccacactgaggggtttgtgaggcctcctggctctgtttgcagagattgattgtgcagtttggatcttttaaatgagatactaaatcaaataaaaattatgatgccttcaccacaagttaatcactatcaatatttgggtgtatttcttctagtcttttcgttttttctttctggtttgcatgggagagtgtgtgtgtgtgagtgtggcatgtttatgtgtatagtgcttgttgtgtgtgtgagactgtggtgcatatgagtgtgcatggggtggggggatgtgttgcagtgtgtggtgtgtggtacaattgtgtgtgtgtggtgtagagtatggggctgtgtgcagcagtgcgtgtgggatgtggtgtatgtgttttgcactgtggtgtgtgtggtttgtgctacagtgtgtgtggtttgtggtatggtgcttgcagtgtggtatgcaccatatgtgtgagcgtgtgtgtcgtttttggtgtgtggtgtaggtgtggtttgtggtgtgtgtggtgcgtgtggcgtgtgtgtggtttgtggtgtgtgtggcatatgtgtggtttgtagtgtgtgtatgtggcgtgtatgtggtttgtggtgtggtgtggtatatgtagcatgtgtatggtttgtggtgtgtggtgtgtatgtggcatatgtgtggtttgtgatgtgtggtgtgtgtggcatgtgtgtggtttgcagtgtgtagtgtgtgtggtttgtgatgtgtgtgtggcatatgtgtggtttgcagtgtgtgtagtgtgtgtggtttgtgatgtgtggtgtgtgtggcatgtgtggtttgcggtgtgtgtgtggtgtgtggtgtgtatggtgtgtgtgtgggtggtggggtggtgtgtgtgtggcatgtgtgtggcttgtgtgtgtgtggcgtgtatgtggttttgcggtgtgtgtggcatgtgtgtggtttgcggtgtgtgtgtagcatgtgtgtggtttgcagtgtggtgtgtgtggcatgtgtgtggtttgtggtatggtatgcgtggtgtgtgtggtttgtggtgtgtgtgtgtcatgtgtgtggtttgcagtgtgtgtgtgtggcatgtgtttggtttgcggtatgtgtgtggcgtgtgtggtgtgtgtggtttgcagtgtgtgtggcgtgtgtggtgtgtgatgtgtggcatgtggggtttgtgatgtggtgtgtgtgtggtgtgtggtttgcggtgtgtgtggcatgtgtgtggcatgtgtggggtttgtgatgagctgtggtgtgtggcgtgtgtgtggttgtgtgtgtgtggcgtgtgtgtggtatgtgtgtggcatgtgtggtttgtggtgtgtgtgtgacgtgtggtttgcagtggtgtgtgtgtggtttgtggtgtgtggcgtgtgtgtggtttgcagtgtggtgtgtgtggcatgtgtgtggtttgtatgtgtgtggcacgtgtgtggggtttgcagtgtgctgtgcagcatgtgtgtataagcgtgaggcatgtgcggggtgtgcagtgagcagtgccccggtgttcctgtgagggtgtgggcgtggccaccctgacgctgtccctgtccctgtctttgcaggacggctgtcctcagcgaggggccgtgcacccgctcctgagcagcgccatgggcctgctggccttcctgaagacccagttcgtgctgcacctgctggtcggctttgtcttcgtggtgagtggtctggtcatcaacttcgtccagctgtgcacgctggcgctctggccggtcagcaagcagctctaccgccgcctcaactgccgcctcgcctactcactctggagccgtgagtgtctgctgggccagtccctgccgcctggggctcccgtgggggtggcgcgcgaccatgcacggggcagccgtgggctctcaggcaggaagtgagggctatgcaggaggtgccgaggccatctggctggcaggctgtcggaaggcacctggctacctctttttcttagcttgagctgtgtgacgtgccactctcaccattctgacccatagcaatggcagcttcccacggtttaccagagcatatgggaatgtttaaacaaaagtaaagagaatgttgagttctgtttacccgttaccaagctccaacagctccctacatggcccctcgtgtgtcctgcccacactgcgccaacaccagagcatgctgacgcgtatttcagcatgcatccctgaaagaaaaggtgtcctgcctccctgcgtatcaaacacatgtgtagctgtgtgtctgtccgtatgtgcctctgtgcgtatgtgtattatacatagagaaaccgatctgtacctgtcatgtggacagagactcagaggcttggtaacaacacccactgtggacaggtaaccgctcacaccgggcgtcgtggggacatgaacaggcgcatctctggagggtggtttggcagtggccgtcaacagtttaagtggttgcaattttcaactcagcaattccacagaataacatgcaacctacagagatgtgcaaaagtatgcaactggacaggtgttctcattttatcacaggtattctcattattgtattatttttatagtagcacaaaactagaagcaacccaagcacctgtcactggagactaattatgcggcacccatacagggaccctctgcggccatcatggagagccttcatcttgcccgtacagttttaagcgaaaaaggaagtatacaacaaagtccatagtatgctatgattcattttgtgtcttaagaaaggatgctgtgtgtgtggtgtgtacatgtgtggaaaaatcccagaaggggctgggcatggtggctcatgcctgtaatcccagcactttgagaggctgaggcaggtggatcacctgaggtcaggagttcaaggccagcctgagcaacatggtgaaaccctgtctctactaaaaatacaaaattagctgagcatggtggtacacacctgtaatcccagctactcgggaggctgaggcaggagaactgcttgaacctgggaggtggaggctgcagtgagctgagatcacaccactgcaccactccagcctgggcaacagagcaagactctgtctaaaaaaaaaaaaaaagaaaacaaaaatctcagaaggatgcccgagaaaactgcgtgatgctgatatccagggagtggggaaaggaggggattcttacgttttatttcacactctcatgctgtttccatgtttttgcatgagcgcatagacacttcgtctcatatgggaaacggtgagcgcatagacactttgtctcgtgggaaacggtaagcgcgtagacactttgtctcacgtgagaaatggtgaacccacatacactttgtctcatatgggaaacggtgagcgcatagacactttgtctcatgtgggaaagggtgagcacgtagacactttgtctcatatggaaaacagtgaacgcgtagacactttgtctcgtgggaaacggtgagcgcgtatacactttgtctcatatggaaaacagtgagcgcgtagacactttgtctcgtgggaaatggtgaacccacatacactttgtctcatatgggaaacggtgagcgcgtatacgctttgtctcatgtgggaaatggtgagcgcatagatactttgtctcatgtgggaaatggtgaacccacatacactttgtctcatatggaaaacggtgagcgcgtatacactttgtctcatgtaggaaatggtgagcgcatagacactttgtctcatatgggaaatggctggcctgtaaccttgtctgcacgatctccttccagttcaggagccggtagcactgctgaaaaggctgtttatgtcagctaacttttcatgcctgcgacaccccactgtctgcagagagactagtaacccagcccttagactagcttgtcttaaatgtgttatagcttcagttcctggtttgttttttctctttttttttttttttgagactgagtctcgctctgttgcccaggctggagtgcagtggtgcgatctcggctcactgcaagctctgcctcctgggttcacgccattctcctgcctcagcctcccgagtagctgggactacaggcacccgccaccactcctggctaattttttttgtatttttagtagagacggggtttcactgtgttagccaggatggttttgatctcctgacctcgtgatctgcccacctcggcctccgaaagtgctgggattacaggcgtgagccaccgcgcccggccagtttgtttccttttttaaatgaaaggctgctgcttttttctgtgggaagggagaattggaaatcctataatataaaatatacaaatgagttattcatgagtataactggataagatgaatacatacaaaaagggcaaatattaactgatgaaaactaaattacagactcctactttctagcagtattctgaagctaaaatactacaaaacagctaaatcctgcctgaaactggctttttaatgcatttctgggctcacagtaaggaaacaaaaacctctcagctccacccttccaccaaatccctttagcaaaaaccggggtgtgcagaaatggaatgtcagcactgcctttcaggagcctaacccttgggcagctgtagcagagggcgctgaagctaaaccaggactcttgagcgagggcgcgagacaagctagggttaacagtgacccttgggtttcagcagaggcaaacgaaagtacactctggagaaagtctcattcaggcctgaagaatcccacagattaaggaaaattaaatatgaattcataatcaagaatgacaacgtaaacagcagatgtggactgaagatgacccactgtgccccgacttgaaagagaaccaagtagaactgctctcagtgagaactgtagatattttaaagcaaaaacttacagacaggttttgtatcagattagatacagttaatgagaatgggtacagaaccaagtagaactgctctcagtgaaaactgtagatattttaaagcaaaaccgtatggatggattttgtatcagattagacacagttaatgagagaatgggtacaccagacatcaatgtgaagaaatcatccagtgacagtaaaggaggtgaaaaatgtgaaataggcgtgaaaagatgtaaggacagaatgagaaccttcataaaatagggctttggcccccatccccaaaggagagaacaggagaagcctcctgggaagagaggatgcctgaggacctcctgaactgatgaaggcacgatttttcagatacaggaagcacatgtagaccaagcagagcgaatgcacagaaatccacacctaggcaggccctggggcatcacagaccatcagagacaaggaggagccgggcgcggtggctcacgcctctaatcccagcattccaggaagctgaggcaggaggatcccctgaggtcaggagtttgagaccagcctggccaacatggtgaaaccccatctctactaaaaatataaaaattagctgggcctggtggcacatgtctaatcccagctactggggtggctgaggcaggggaatcatttgaacctggtcggtggaggttgcagtgagccgagactgcatcactgcactccagcctgggtgacagagtgagactctgtctcaaaaaaaaaaaaaaaaaaaaaaagataaggaagtcttcgaatccccggagaggaaagctggagaaccacgctggatggtcagcagtgaggccgacagcagatttcttacggcaggcagcagtggcgggagaaggtggaagatcctcaatgtgctggaaaatcaccaacctagcaccctgtgttgttcaagagtacaaataaaataaaaaggttttggtaaacaaaaaaatgagagcttttactgcccatagatcttcacttcaatattttttaaggatgtgtttcagtaagaacaaaaattataaaagtagggtataattttcaagaaagaatggtagccaaagaaattaggagatggatgaatctaaaccgtatgtaaaataaaaacagtgctcagccgggcgcagtgggtcacgcctgtaatcccagcactttgggaggccaaggtgggcggatcacctgaggtcaggagttcaagaccagcctggtcaacatggtgaaaccccatctctactaaaaatacaaaaattagcctggcatggtggtgggcacctgtgatcccagctcctcaggaggcagaggcaggagaatcgcttgaccctgggaggtggaggttgcagtgaggtgagactgcaccacgctcagctaattttttgttttgtatttttattagagatggggtttcaccatgttgcccagactggtctcaaactcctgacctcaggtgatccgcccacctcggcctcccaaagtgctgggattacaggcgggagcgcccagcccaggttcagattttaatggtaactttgttaagtatagggtaggaaaaaagagagatcaaacatagcttccaaagtattagaaaaagataaagaaaaaaaggtaaatctcttttgttaatgcaagaaagtagaaagaaaagcattaaaataagaaatattgaggtatacattaagatcaatataaaattcccagatacttgggatgaccacaaatacacaagaaaagcacttcagtaagaacagaaataatcggcctctccatctgctgggcttgcgtgggtatgtgaattccgtctgtgacttgttggatttgggatgttctccacttagatttatttccatgaatatgtttgtgggagcctttctgcagtcagaggtatgtggaagcctttgccagttcaggggcgcatggtgagagcagacctcacagtgggtttgtttatgtttgtttgtttttgagacagggtcttgctctgtcgcccaggctggagtgcagtggtgtgatcttggctcactgcaatctctgcctcctgggctcaagcagtcctcctacctcagcctccttgagtagctgagaccacaggtgtgcaccatcatgcccagctaatttttgtattttttgtagagacagggttttgccatgttgcccagactggtctccaactcctaggctcatgtgatcctcctgcctcagcctgctgggctgctgggattacaggctgagccaccgcaccagccacagtgttttctgatgaccctgaaccacggttttattttcaattcttcattcctgttctcattccttaatgctgggtgccttcttgctgcccattttgaactcactgccagtgtgtctctgctgtcatctgatgtgcagagctataggtgctgcggcgaagggtgcaggtttggagccgtttaaacaacctggcccagcctcctcactccctgctgaccttggtcaaggcttcagtctctaaacctcagctttctcatctgcagagcacagacaaaaccacctgcctttgagctgtcttataaagcctaaatcaatgcgcacagcaggtacacagcaatgcttgataaattgttactattattgggtgaattttaggttttttttgttgttgttgttgttttgagacagagtctctctgttgtcctggctggagcacagcagtgcgatcttggctcactgcaacctccatcttctgaggttcaagtgattctcgtgccccagcctcccaagtagctgggattacaggtgcctgccaccacatccagctaattttttttatttttaagtagagatgggcttttgccatgcttccccagctggtcttgaactcctggcctcaagtgatcctcctgtctcggcctcccaaagtgctgggattacaggcttgagccaccgcacccgtccagaattttagatttttttaaatccgtggttgaaaaataggctatggctggcttactcattgtgctttagggaagcatgtatttgagtgaaggaaatgataaaaggaatttcatatcgggcccaggcgccgcccaccctgcaagacagtttacagatgcctgccctgacagctgtctgcagttagccagcgtcagccgaggggtcctgagatccgctgaaggctgcctttgcatgccgacagcaagggaaaagtgccacatgtccctgggcttgccacaggtgacctttggatgggaccattctccagacagcgcagctcgtctttccagaacactcatggggagtgtgcctgtgtctggctggctgtgtgggctcccattcagttcattccccttctccagcctttaggcatgaccctaaaggcagaggtctcaagcacttgccaggggtgagccagcggtgggggcgcccctgccagggcaggcctgctgtgggggcttggtcagcgagtcttctccccacacgcaggatttcctcccgtccactgcctctgcccacaggtgacctttctcttttaaaggaattggggtcccttggtacccccacaaaccctgagttccctctctcctttctgcgtcctttctgctcgcctgcatgtgcctgcagcatcatgaccgctgggaagacacttccctgcacctgcacgctgtctgcaggcgtctctggccatcctgggctgagctgcgtgatctcgggtagcggccctttgttcacccgtgcaggatgtctttggaattggtctctagtgtcctttataaataactggtataaaagaaccccgggcaatggccttgcagaaagcccacacttcagagctgggctggtgtccagcgcgagaagcctgaggccgtcctgagctggaagccgcgtcctggttctgtggggccatccttcccggacaactggctggggggcacaagactctggtggccgacaagaggcccacctgcttggcctccctcttgtccttccccacatggccctctgaacaggactaactccctctgaggcccacgtgtgacaaagatgcaccgttctcaccacggaactcttcagccctgcagttctcccgaaggtgaatgagggcatcccagagtccccatcaggagacagacgatgctgcgttcccagcagccccagagccctcccaggcgtgcaggtctcctgccggcaaacagatctcccggcacgagcccctccacacttctgggaagagtgtcttcagctcaccaggccggagccaggggaagagaccaagggaggaggctccaagaacccctgggtgggggggacaagcactcaaagccaggactggcacccctcacatgccagcacccacggggtcaggtgtgccctgctgtctctggggaccccgcaggcctctggccacctgcccagcagcaagccccgtcgagcacccccagccggccttcctgggggcgggctaggcctcacatggcttttttttaaatatggaaaaccagtgtaaccccaaagcaagttttaggagaaaatataattcctattactctgtcgtctataattccattctgctcttaactcttcattttttcccactgtctgttctgcagacatacgatggttgttttctgcttcctaatcatctagtgacatttttcatcttctgcacctctcacggggcgtggctgtgcggtactcggccacaccaaggtgcacgtgagaagcgtaattgggcgtaaagatcagcgtctccatgcagagtggcggttctctccctttctgctgctaccttccatctgtctcctcccaactgttgcttagagaaagttattgtaatttcataaaacgtactcagtgtaagtcatcaaaactcatgtttagcagagacttcctctctggacaaaaatactgtaggtgtctcctgtgggcgctccctgaccatcccaggaggaggggtcctaccagtgccaacgccctccccctgtccgcagaactggtcatgctgctggagtggtggtcctgcacggagtgtacactgttcacggaccaggccacggtagagcgctttgggaaggagcacgcagtcatcatcctcaaccacaacttcgagatcgacttcctctgtgggtggaccatgtgtgagcgcttcggagtgctgggggtgagcggggacctggggagggccacgggtgagcaggagggtcccggggagggccgggggtgagcggggacccagggagggccggggtgagcagggggtccctgcagggctgggggtggggtggtgactgggagtgagctgggcggggtcccaggagggctggggatgagcagggtggggtggtcctggggagggctgggggtgagtggggggtcccagggagaggctagggtgagcaccttccaggggaggtgctgggagtgagcggcaagggtcctggggaggatctgggggagtaggcgggtgctggggtgagcaagagggccctgggtgggggaggtactgggtggagcagtgggggtcccagcagaggagctgggagagccttgggtttcccagggaaagggctaggggagcaggggactccctgaggaggtgccggggaggcccctggggtccgagtccctgggtgttcctcctggggcgtctctttgagctcggcagtggtgcctggctggttgaggggccctggcccgcagggcctcagctgtccccgagctgtgccctcctttctcatcatggcctttgcctttgagatgaccccacctgcgtccctgcagaaccacttccgttagctaagctgcctcagatgaaacctaaactactccccgatgctggcagaagaatttcattgcagtcaaagcccctgtgtgaggcagcacccccaggccaccccccggaagcctggcagcctctgcatccggctcatccaccttccctgagggccctcccagccaagcctgagcctcagtttcctcatttctggggcgacccactcaccctcagaagccgggtcctgcttcacagcagaccccctgagccacaaagccgtgactcctagagcgacaccacacaggagctgggtgcagcgggagcctggccaagcccctggcctctgtccgacgctgaagtgccaggtgcccctccttctcctccctccagagctccaaggtcctcgctaagaaggagctgctctacgtgcccctcatcggctggacgtggtactttctggagattgtgttctgcaagcggaagtgggaggaggaccgggacaccgtggtcgaagggctgaggcgcctgtcggactaccccgagtacatgtgggtgagtgcgcggagcagcccgataccctgcatgcctggaggaggccacgccaactcctgatgcacggctgcccacatcccaggctgggaaaccccatgagagcctctgcacatggggtgctgtttccatggggccatgactcccccatctgagctgcaggcgtggaggcttctcttgggccacctgcttgctactcgccgcaatcccagctctgaccaggccatcctaaggggatctggccgggggagggggcagagcagggtgcccccagtgagccctggctctgcccgccctgctcagtgtgcatccccattctttttctgtcccttcttcctggtctgtcttggaaaatgggctgcctgtgctgttagcatttctgtttttttgttttcttgttcgttttgttgtgtgtgtttttgtgtgtgtgtgtgtgtttgaaacggagtctcgctctgtcgcccaggctggagtgcagtggtgcaatctcgggtcactgcaaccaccacctcccagatttaagcgattctcctgcttcaggctcccaagtagctgacattacaggtgcgtgccaccacacctggctaattttttgtatttttagtagagatggggtttcaccatgttggccaggctggtctcaaactcctgacctcaggtgatccgcccaccttgacctcccaaagtgctgggattataggcatgagccagcttgccagcctgctgttagcatttctttttttttgttttgagacagagccttagtctgtcacccaggctagagtgcagtggcatgatctcagctcactgcaacctctgcctcccgggttccagcagttctcctctctcagcctccaagttgctgggattacaggcactcaccaccacgactggctaatttttgtattttcagtagagacggggtttcaccatgttggccaggctggtcttgaactcctgacctcatgatccacccgcctcggcctcctaaagtgctgggattacaggggtgagccaccacgcccggcctgctgttaacatttctaactcatgctgtggcaagtcgatgaaaccctctctgttttcacactgctcagaggctgctgccccaacacaccttcatgtttcacttctttctggaaagttctttctggagagctctcctgtgtgaatgaacgtgtgtgactggagtgcagactgtggccctagaataaaagaacctttcagtcataacccatgctgctcgctaaagcggttccaagatttccacaaattcagccacaacctttgctgcctgtcagagaggcaggcctggcctggacatgcacccaccccagctgctctgtggagtgaccctgtctccgtgttgatcctagtttctcctgtactgcgaggggacgcgcttcacggagaccaagcaccgcgttagcatggaggtggcggctgctaaggggcttcctgtcctcaagtaccacctgctgccgcggaccaagggcttcaccaccgcagtcaagtgcctccgggggacaggtaggccccagactgcccgagccggggccaccgctatgctcacggaaaatagtgatttctttaaaaaaaaaaaaaatgagtgcattccatgtgaaacacagaagaacagaagtgcaaaaggaatcaagtgagggggtcggcgccgcaaggttcccgcgtcaggttttgaggtgataaaatgctaattcatgagaaacaattaaaataataaaaaatacataatgcaaaaccttatgaagggaaaataatcattattgtatcttattaatccaaaaggagtcaaaataaaagaaagggacaaagaacagaaaacagccagacagcagggtcacactcacagcgtcagtacccatgggaaacgtcagccactaaatgccctcaccaacagagaatggggaaaaaagagggggaaagaaaacttagagaagaggtcctggtgtgttctccccaggacggggccagacccctcacgcgttctccccaggacggggccgggtcccaggtggaacttgcttttccctctggcagtgaccatgcagccgcctgggctgggtcattcaccctcccgtctcctcccacagtcgcagctgtctatgatgtaaccctgaacttcagaggaaacaagaacccgtccctgctggggatcctctacgggaagaagtacgaggcggacatgtgcgtgaggtgaggccagaccctgtggctctcgcgccgccccccataccttcatgagcttgcgctgggcagaggccaggagggtggctgggtccaggccccacgtcccacagccccgcagggtggaactcacacggaaggcctgtctgcagccctgccctgctgagcagacacaggagaggccctgcaggactcgtccggggcttgggttgcaggccacggagaggacatggagacacgggggatgtgtggggagactcaccattgcccacggtgtgtttcattcctttggggaaatcattgacctggctttcgaggccacctccatcctctccttctgcctccttgggaagcccctgtagttccctctgtaagatgctctgtccctttgtgggctttgtctcaaaccccactgggctccataagtctcctggggcccacagtcacacgacctggggggcatacggtgctgacttctcaccgaggggtgaaacccaggcaggtctcttggtgggcaggacgggaccacctgcggagcccctggcctgaagcagcgctggtgatgggagtggctttctgctggccctggtgatggcagccgcagcacgcgagggaccgcagtgtctgaaggagacagtggtgaagggaaaggaagagcctgtttgatttttttttttcttggagacggagtttcaccccatcgcccaggctggcatgcagtggctcaatcttggctcactgcaacctccgcctccccggttcaagcaattctcctgtctcagcctcctgagtagctgggattacaggtgcccactacctcgcctggctaatttcatatttttttagtagagacagggttttaccatattgtccaggctggactcgaactcctgacctcaagtgatctgcctgcctcggcctcccaaagtgctgggattacaggtgtgagccaccacgttgggccgaagagcctttttcaaaccctgtcttgagagttggggcttcagtgctatggggccccagtcctgtcccaatgaaataaaatgggagtggcgtgtctagaccccaggaggagcctggggcttgctctgcagggtaccagcggctttccttggggcagtgtgtctctttccccacacagtcagggctgtgggtgccgccaccaatccgttgctgcccttggactctccaagcttctctggctcacatagaggagaaaatccacccagaaatcctgttgacttaaaacacaggctggggttgtgaccttgattccagcacaaatcatcatttcaggcaggcctttgaggcacgaagaaaccgtgcgctggatggcccttgttgagcttgtcagtctctggtttcattcaagtgtgtgcggaaaggcagggccctccttgccacatgtaaagctgcacagagcggtcactatatgtgtttccatatttgcaatccaaccaccaccaactgagtgtgcgtcctgatcagccgagcctgcccacggtggccacaggccctctacattctaatctcgagagcctgagcatgtacaaattaaacgaagcaaaacgacaccacccagttctggccgtactataggaggtttccaggaagggtttgtgaacataaacataagctaggtaacactcctttctgaagttcaaggactggctgattagaggcggaggcgttcttctcccgacccggggtcagtggggccacgagctgagagttctctcccttatgtgcctaaaacccctgggagggagctctgagccactgtggaccatggaggctgcggtgactgaccggggccctggacggtccagatggcaggctgggacaggacatgagaggggatgatagcagctggtggccctgtgccagatcctggccacagctggcctcagtcatcttcacgagaggagcccttgaggcacgtcttgctctcatccttgggtggttagtggtggcttgaggctgggtggtcagagtagctgtccaaggtcagcactggccatggaggagcccggccacccgccaagctgcacggcgcctccgcctcgggtgccacacagccccccacggagagactcctcatccgccatcctccctgccgctgcctttattttgcccgatcatattttaataaatactcgctttgaacttgtaaggcttcggctgttcaggtcactcaccgcttcgctgtttgaggagcagcagtgtccccgcgcgcccctgcagccgagccatcacagcgccaggctccccacagcatggggctggccctctttcctcctgctttggtggcgatgcccagggccatggggaagcagggccaatgtgtgcaggacggctgcagggctctcctgtccccagggctggcccctgggccgagggccttcaagtggcttgagtcagctccaggaggcagatgctcagggtgacaccctggggtgcagaaaaaaaatagaatttttatttatatttactttttatcttatttttaattcttatgtttatatgtttcataatgtatgtaacagacatacgataaaacctgtatgtggggcatgtgtgggtgtgtgtgtgttcatgtgggatgtgtatgtgtggtgtgtattatgtatgtagtatatgtgatgtgtgcatgtgtggtgtacgtatgtgcattgt[450 bp omitted]gtgtgtataaattatgtgtttgatatgtgtggtgtggtgtgtataaattataaatgtgtgtgtggtgtgtgtatatgaatcagggttggtgtgtgtggtgtgtataaattgtatgtgtttgatgtgtgtggtgtgtacgacatggggctgtgtgtgtcagggaccacagccagccagtgtgggcctctgggcaggcccctcccctcactgtagacaaagaagcctctgcgcctcggttgttcctcacatggcgtctgtggcaaatcctccccatgccagttgaacctggggccaatgtgaagctgcttttatttactgggacgtgatgttgtcttcatagccatctgctcaccagcatgcggcagaggcttgtgaacactgcatgtgtgctggtgtgtgctgtgtgctgttgtgtactggcgtttgctgatgtgtgtgttgtgcactcgcatgtgatgtgtatgtgctggcatgttgcatgtgctggcatgtgccagtgtgtgcactggtgtgtagtgtgtgctggcatgtggtatgtgtcgaggtgtgctggtgtgtggtgggtgctggtgtatggcatgtgctaacgtgtggtgtgttctggtgtgtgctggtgtgtggtaatgttttggtgtgtgctggtgtgtggtgtgttctggtgtgtgctggcgtgtggtatgttttggtgtgtgctggcatgtagtgtgctggcgtgtgctggcgtgtggtatgttctggtgtgtgctggcatgtgtgtggcatgtgctggcatgtgtcggtgtgtgcactggtgtgtggtgggtgctggtgtatgacgcatgctggcgtgtgcttgtgttgcaacgagactcagctttcacttctgatggggtgaggatccataggtggaatcctcatacaccaaagctttgggttcctcagttcctagacagaagtgtgaggcgcgtgaccctagagcgtggagacctgcctggctgtggaaacctcacccatgggccccgcagctcaagcctggtctttcctgctctgaggtgcgtcgtcgccccctcctgggcgctgggagcactgcggttgcccgtggacagcaggttcctacctgtgtatcttaattttgggttttttttgtttgtttgttttcgtttttgtttttggcttacaacgcagcgatttgcttctccctcataaaggtccacgatgagcccagacagtgctcggggcagcccagctgtccccacctggtggcacggggccgcccttccttagcaaagtgattctctgacggccgtcgcagggaagaggcagcattgagcacccgctgttaagatgctcccttacggaagcgacttgtgggaggcagggatgtgtgtttttcttttccttttttttttttttaagagaaaaccacattttatttttgttaatgttgaagttaattttcaataaaattttatagaaaatgatttttattttttttttttgagacggagtctcgctctgtcacccaggctggagtgcagtggtgcaatttcatctcactgcaacctccgccttctggttctagcaattctcctgtctcagcctctcgagtagctgggattacaggcgcattccaccatgtctggctaatttttgtagtcttagtagagatggggtttcaccatgttggtcaggctggtctcgaactcctgagctcgtgatctgcctgccttggcctctcgagtagctgggattacaggcacattccaccacatctggctaatttttgtagtcttagtagagatggggtttcaccatgttggtcaggctggtcttgaactcctggcctcgtggtctgcctgcccctcggcttcccgaagtgctgggattacaggcatgagccactgtgcccggctgaaaatgaatttaattttaatcagtttgactgtaaggcaagattttatgaatttcgtataactttcataattgttttgaatgaaagagtacattcacgttctaagaaaactcttcagacacatgagccaaattttgttcttatatcagtgtttttaattttattgcttaatttatataaacaacctgtttatataaattaatagcctgaatagcctgttttgaatagtagccaacttgttcagatatgtgtttttcttaactgcccagagggaagggagaactgggcaccagtgaaaacaggtcacgcctacctgacgtcttgccgtgtggctcagtgacgggcgctgtggacgtggcagcccctgaatcccagctcccgtacacacagtatcactgctgccttagtcaccaccgtcatcctagctggcaaacttggtgttcttattaaattgtaaaagtatttaaaagattttaatatatcatatgtgagcggcttaccctgtgtacttactcaaattccaactgacttttaaaataagagctgtaacatgttactcatttaaaattttccgattagatttgtccaattaggtaatttgtaattaccctgcttatcttaccaagtagaggtgtcaacttgtgggctgctaatccatttggtagattagcacttaatcttggtagatttagtatgtaaataaatgagtgtccagacagaaatcagctatttcataatggagatgaaaatgcctacatttttaatacttttcatatttgaagcaagtggatttcatttgtgaaataatctttgcctaatgaaagacactctcagtcatgactgtctctgaagaatgaacatattaagaaagaccagaactctcgggagcgcacacatgaccacccttctcatgggaccaggggcgtggcctgcccggttaaatcactcgtgggcaccctgggggttaatgctgccgccaccctgcacagaaggccacatcctggcctctcgccgccatgccacgctgactgtgtactcagggcggatgcctgaggagaagctcatttaatgtttgtttttagaaattgagagtgagaggctgggcgcagtggctcacgcctgtaatcccagcactttgggaggctgaggcgggtggatcacgaggtcaagagatcgagaccatcctggtcaacatggtgaaaccccgtctctactaaaaaaaaatacaaagaaaaaaaattagctgggcgtggtggcgcatgcctgtagtcccagctgctggggaggctgaggcaggagaatcacttgaatccgggaggcagaggttgcagtgagcagagatcgcaccagtgctctccagcctggcaacagagcgagactccatctcaaaaaaaaaaaaaagaaaagaaaagaaattgagagtgagatgtgacagaaggagtggggcccataggccaccctggcacacgacatgttcccctgtgccctctttctagtgtgaggtcatgtggtgattcaccctaccttgaatcttcttcataaaacaggagatttcctctggaagacatcccgctggatgaaaaggaagcagctcagtggcttcataaactgtaccaggagaaggtaagcaggctctgctcccgctcagggtcccggtctcctgaagaggctgtggaaggggtgctggcgagcaggcaggtgacacgtgggaactccgtgggagacaggagtgccacccaggtcctaaatactcctgatccttctttcatttcttctttctgttgttttgttttgtttttgtttttgttttgttttgttttctgagacagggtctcactttgtcacccaggctggagtgcagtggtgcgatcctggctcactgctgccttgacctcctgggctcaagcgatcctcctgcctcagcctcccgggtggctggagctacaggcgcaagccaccatattcagctaatgattcaaaaaatgtatctttgtagaaatgaggtcccactatgtttccaggctggtattcaactcctgggctcaagcaatcttctggcctcggcctcccaaagtgctgggattacaggcatgagccaccacacctggtcccttcttcttaatgtttgagaaattaacaaactacagacaagtatgaagggtaacatgatgcctgtataattatggctggtaacatttggtcacatttgtttcattttcttaaaagacattacaggtatgtaacagacatagatggtcactagactccttgtataacagaaacaaattagggatgttagagcattgctttgaaaaccacactcagttcttatttctttcccccacggcttactcagcccaagaactactttctctttgttttatacgcacaaatgcatggggcattcgatttccactgtcggccttgtgggagaggagataaccaggaaatcctcccaggatgtaaaaaatatcatcgtaaatgcattgatgggctctcaagaaaataagggaaatcggtcgggtgctgtggctcatgcctgtaatcccagcactttgggaggccgaggtgggcagatcacctgaggtcaggagttcaagaccagcctgaccaacatgggtgaaaccccgtctctactaaaaatacaaaaaattagctgggcctggtggcgcatgcctgtaatcccagttactggggaggctgaggcaggagaatcgcttgaacccaggaggtgggggttgcaggagccaggatcgccccattgcactgcagcctgggcaacagagtgagactccaactcaaaaaaaaaaaaaaaaaagaaagaaaaaaaaagaaagaaaaaaaaaaagggaaatctccaggactgaaaagggaggtggggctgagactcggtcctgggcctgggagccagcagcaccatgcccacctggtgctttctgcctgccccatcccctgaagtctcgtgctgtgatgcctacatggaaacagaagataaagatttcccctcattcaaggcgggacgttagaaccaaaaaccccacatgatgctgggaccctctaagaattggaccctcaggaaggttaaactggaaaagaaaattacctcccagcacagagaaatggccttgaaacctgcctttctcctcttgggctcaagaaagtcttcctgggaattcataattacaggcctgtcctccaacaggcttgaagtttgaatttatacaaacaacatagttcaagaagcacacagccaaaatgtgtgtgccaggacactcggggacattccggaggcagggagctgggtgctcaggggtggccaggacacgatgacacctgcctttgcacggacacagtgtgtggctggcagggggcaccccaaccccagtttccagcaggaagctgagaaccatgaagagatcaaagagatcaactagaaaaaatatcttgaagccagtgagctcagtgataacagtctccaaccatctttaaaagagagcgggtcggccaggtgtggtggctcacatctgtaatcccagcactttgggaggccgaagtgggtggatcacgagatcaggagttcgagacaagcctggccaacatggtgaaaccctgtctccactaaaaatacaaaaattagcgcagtagtgggcacctgtaatcccagctactcaggaggctgaggcaggagaatcgcttaaacccgggagacagaggttgcagtgagccgagatcgtaccactgcactccagcctgggcgacagagtgagactccatctcaaaaaaaaaaaaaaaacaaaaaaaaacgagagagttgatggtgcccttcactacttcccaagcatcctagagtcccacgggctgccccgcccacgggcagtggctgcggagtgtctgctctatcaggcatggtgatttcctgccagcctgtgcctttgacattcccaccagaggcagaaccttctgcaggtggccctggccaggctcctctctcctcccagctcctcattagcctcctttgccaggctaggaaaccgaggtatgcgaggttaaggaactttccttgggccgtgcagctgagagtgcgctttgcagggatttgcatccaggccgcgggactcacacaggccacacctgccacccccactgcctctggctcgtgggaggtgtgggatgtggcgggtggccggggcagtgctgggcaggcaggtgttggtattcacaacgttgctttcttgaccgattattttcctgggagacttcctcagtcaaagggttgatatgcttgcgagctctcgatgcacgctatcagattctccaaaaacgtacagccagcttcgcctgcacctgcagcttctgtgatttgtgctcttaattgacgtggcgctttttttaggttgagtcgtttttcattgccaacaatcttctcctgcattgaaataatagcttgtaaagaagcctcacgcttcctttttctctgttgactcttctaggacgcgctccaggagatatataatcagaagggcatgtttccaggggagcagtttaagcctgcccggaggccgtggaccctcctgaacttcctgtcctgggccaccattctcctgtctcccctcttcagttttgtcttgggcgtctttgccagcggatcacctctcctgatcctgactttcttggggtttgtgggagcaggtaatggacactgtcgctaacagctcacactctgacgggcctcacagtatcagccacagggtccgggacctggtgactcatcacagtggctgtgggaggcaggggcctggctgttatggaccctggagccaggatccccccacggcctgcgggcctcagagcctggattcttgcactgagctgagggtcgcctccccagagagccgaacggccgccacctggcgccatccccactgcagccccactggctggcgcccttgaggatgccgacgagagggtccccgagagggtccccagcccccctgtctgcttttgggctcttaggggtcaggctgggctggccattcgggaggtttaagcaggacatcatcattcagctcctccccattgacccccagtgacttccccactgtgtgcccaccccaggcacaatgccaggcccaccacgactcatcagctagcctggggccgaacagacacccagcctgtccctgtggtgagctccggcgcccacccacaccccgtaattgaggggtctctgtccgtggagacacagtccgtgtgcatcgccccgtgagccgactccccaggcccagcagctgggccagctcctcccctgctcctgccgcccctgccaggggccttggtgggaggggtcctgagaggcagtgactgccaccagcctctcccattggactacgagatgacttgaggccacccacagaggacaggatgtgacctgcttacatccgagggtcctgctcgtccacctctgtcacctgttgggtttgcaaggccgagctgttagaatgccccgaagcccttctgctcccaccagccaaagacccagaggggcaggcagggcaaggtccacgtgtccacctgcctcggacccagccggtcagaagacgtgcccctcacccctgcctgagcagaccacggtctgagagggctgtctccccgcgggccacacctactcactgacagcagaggccactgggtgcggggcagagggacagggtctggggcagaggaaggaagccccagtaacacgttttacagcaaaaaggcaaagtcatccgtctcacctcttctctctctctcctgtcttgaaagcttcctttggagttcgcagactgataggagtaactgagatagaaaaaggctccagctacggaaaccaagagtttaagaaaaaggaataattaatggctgtgactgaacacacgcggccctgacggtggtatccagttaactcaaaaccaacacacagagtgcaggaaaagacaattagaaactatttttcttattaactggtgactaatattaacaaaacttgagccaagagtaaagaattcagaaggcctgtcaggtgaagtcttcagcctcccacagcgcagggtcccagcatctccacgcgcgcccgtgggaggtgggtccggccggagaggcctcccgcggacgccgtctctccagaactccgcttccaagagggagcctttggctgctttctctccttaaacttagatcaaattttttggtttttaatcagttatcttgggaacttaacctggcccctcacctcttctgcaccccccgcccccgaaactgtctcgtaatgaatttctgctgtcctcctgggagtggacggccgggtcccgtcccccgggagcatcgctcggctcagcaccttggctcccagtgggggccccgtggagggcgcccgtagtgataagcacaccggcacgaacgtcaggtccattcctcgaagtcggagccctcactctgccctgtcctggggctggctgagggcgaacgccccacctcactttctagagccctgtctgtcctagctcctatctgaccttgtgtgtaaatacgtacatctgtttttaaagtggatgggcccctgagaactcagtgaaatgcagagttctccatgcacctaaagctcctttgtcgctctcatggctgtcagatcctggtccctccacactgggtgctggggagggaggaccctcggggctaccgcgcgcccccccatcccacagatcaggagccaaggagggagaacagggcagcctgtgggactctaggatgcttcagaagaagcgacggcaccgtcaaccctctgttttttaaaggtggttggagactgttaacactgagctcattgacttctagagattttatttttactggttgatctcttggtggttttcaacttcctgctggaaactagaggtggggcaccccccaccccccagcctcgcactgtgtccttggggaaggcccgcccccatcctggccggtgtcactgtggcccggccacccctgagcgcccagctccctacctcctggacgtctctgagagtccaggcagagcagagggcagcgctcggccggtcatgctggctcccttggccttgcagcgagcccctggcccacgccgagcgagggatgcttctccctacagcatgtccactcccccggcatggccaggtggggcccctggggcaatggcagtggtagaacgctcaacttggttgcggtaccatcagcccacctgcatttggctttcgacttgcttgttctaagtcacagcgccctcatctttttagcaaggtaaaaaaaccaaaatgggtgttatctctgatatcttgaaaccagcgttctgaatagaggtaggttgagttttctaggggaaaacaaatggagaaaagaggcatgaagaaaagtaaaccgagaacataattaggcatcgggcctaagtgtcctggggagattggaggggacggcagcgttctgcatgatggaggcgctgccgggccccgggtctgtgggggccgtgctctcagggcgtgtgcgggacgccacctgtgcacacctgctcagagcacggctcctcgcaggggtgaaggggcagaccaacgaaaccagatgagaccaacgacaccatgcgagacacgcttgcagacactgttgttttggaaatgtgcttccctccatctgaaatctcatccctccacccgcccactcgggcagctgtgccgtgggcagggcatgcgctcccctggctgagcaccccagagattctcctgcaccttcctcatgccgcacgctgctcatccgtctccatgtgtgtttagatccatgccattcactgactcactaacacctgcaaaatctttaaggaaaaaagctgaagggtacgaccatgcacatatgtgacctggaaaatgcaaatttagatcttttatgatttaattattattgtttcccatagaagttccctccctttgaaattaatatataatgtataaattctgcactgagccatggcggagctgggcagcccctaggttagagtggagacggaggcccaggcgcaggggtcacacctcatctggtttccttcccatctcacagcttagcttgtgcttctcaacaccaagtctttaagagcaataaaaactacaccatgaatgtttgaattttttttttttgggggggggagggtggattttgcttttcatccagaaggaaaaggggaggagagctcctttacattttttaaattaaattcataaatcccagaacagtcttttttttttctttttcctttacaccctacttctgagcttaattcagttgatgttatgtccaaattcaggctgagtgctcaggctgaagcaactctgtagcccacagtccgtgctggccactgtcggggtgaggcacattctaggcctggcatcgctgatgccctctgcacccagtccttgagccaggccgaggacaggaagggcattgctggcctgtagctcctgttacccacccagagccaggcgccacactggaggctcccaggcgggagggcccaggcccacccacgggcgtctggccggtcaagctcccagcctgggccgtggtctcctggggacgccgctggcctcccagcttaggcccaggtgccaggtgtcatggggtctcctgcccatcttcccaaggatgccattgctgtcttcatcgtcttcccccgtgtgagacactggttgtctggtactcggcgacagtgtaccagacgcgcaccctatgtgaggtgctttaaggtccctgtcctcaggaagcgcagtctggtggaagagatgagcgctgaacaaatcactaaataacacaaaacaacaatgtaagcagcactttcttgtgtaaaaaaaaaaaaaaagcacgtcctgtcgatgaattttgagtctctctgccttgcctgtcccgactccctttcgcgcaccgtggcatgagaatctttcctcacgctgttcgttgcggtattgctgagcattgatgttgatttgaaggaaaagccgtggttggacccagctgtgtgtttcactcacgtgcaattgagtagctgttgccaggctgtccatgcctgttgtgactaccggttggggtcagatttggggtgaagaatgagtaagtttctgcatgctttgtctctacctgagacacttctacaacaagccaagtataatctctccagccctgcagattttcacctgacttgttcagccccatgcgtagactcccgctgcaggcctctggcctgtggctcactgcatgcagcccctggcgtgcaatactagtgctccacggcgcgatgtgcttctagcccttgcactgcacctaggctcagggttcaaacggccagcccgaaaagcctgcctgccttctttctggaaacagcacgtccccggccgtgtgcctgcccctttctctactgagctagtccccaaaccaaaggcaagccccctcgggcctcgggggatggggccggccacacccctgactccgccctggctctgccccatacccctgccgtggggccgacctgggggatgcagacatccggctccgtattcctgcctatcggggccaggatgcaaaaacaatttttgcgtaaaagatgtcacactgatctgctggagtggggtggacacatgaattcagttttatcatgaacactcgccactggctgcttgttaattcagggataatggtggcattcttacaaactgctcgggaaatagaatgacgggaacacttttagggagcccaggaagttaccagggacattggtgtcgccggcccaggcaacagcagcgtacgcttttcaaagatcattgagttgtcttagaatttgaagctgtgtaatgacaatgtcacctggagttcgtctccatttcttaactttttgttgcacaagtatttggacagaagtcgaactgtgaatgagatactgaaatgcactaaattgtattacattaaactggagttacttgatacaatgaagaaatgcatctgatctacttgtatttattgtctcagaattgtacgttgtgacaatcaaatgttacttgcctaaatgccaggaaattcaactggccttttaatcagcaagatcgccagcaagtactgtaactgtaaaggaaaatctctctctctggagaacccacacaaaccattgacctgagtgcgcatgacagccactggcttctttttctatgattgaaaatctgccatcgctgactgttggccagtttcaaagggacccattgtatacagggtgcaaatgtattatacggatgtttccttttgtacacttcatttttacaagttttgctactcacaagctttatgtagtggaggatagaggtatttttggtctttagaagcttgtcggggtgagggctgctaacttacacttcagaggcctgtgtcccaaaggcctggctgcgtttgccgtgctgtgcgaggacctgtgtacacaggcaggtgtgcgcctgcccgagcgcgagtagctcttgtgtagtggtgaaatgctgcaggcatctgtttattaaaattgctgctgtgaaagacagggataaaatatccacaatataagagaaagcgactccgtgcctccttctgtttcttcgtttccagtctgcatagatgtctccaaggggaaaccagggccaccaggcactcctgtcccatggggccacccaccttcagagcccactcccacgggctctgtttccttggaggccatcctgccgatggcacttttcaaggccctcccttccctacgagttgctttctgggaggggaaattgaaaaggagagcggtcacctggcaaaaacacaggggaaatcagccagtccacaaaaatacgcaaaatgacctgatgatgtccaaaaaagggttttaaaagcgatcaaggacaaaaggttttcctaagtggcatgtatacatccaaaactactctttttttgtaaaaacattcatctgtggagaaaaccaaggaacccctttctcttctttattaaaaagcaaaacaaaaactcttgttagaaccaaaagatattccgagttctcgtttcgtgtcttctaaaaataagctaagctgaagagtctgggtgtccacatgctcctgggaatggccctggcaaccttggtgacatgctctctgctccggggctgcctccttccctaatggcatcagtgagggtgacaggtccatgctggtgcttagcccagctcctgagaagctgggaaggcctggctcaaagtcctgcgtccagatgccatttattttttaaaatatatcctgaagtcagagcacccagaattttgcatgatgttctgttgttttctcgggagatgaaagtgaagtgcctggtgccacttggtatggggatgtcatgggtgggtcaggccttgccctctaacaagagggactgacttgcctgaaccccacttcgcctgtttgaacacaagtgctcacgggcactggggggcagccatgcagaccccttcggacttcatcacccccagcatcacaggcatctggctcacccaggagaggggccaaggttaaccatgaggcccattgcctgcctttattggcccagatcccacctccgcttcacccagaagctcagtacgtaggagtcagtccctgccacctgacattctgggacatgtgagtgtgtacacatgtgcatgcatgcacacaccatgtgtgtggggaccttcatagccatacgcatgcacacatgtacacacgtcccagcacacacacgggcacacctgaagaataaggggcagcgttaggaagtgggcttgggaaaccatcctcttcatgtctcttcttgtttgtttgtttgtttttgagacggagtttcgctctgtcacccaggctgtggagtacaatggtgtgatcttggatcaccgcaacctctgcttcccgggttcaagcgattctcctgcttcagcctcccaagtagctgggattacaggcacctgccaccatgcccagctaattatgtatttttggtagagacagggtttctccatgttggtcaggctggtctcgaactcctgacctcaggtgatccacctgcctcggcctccccaagtgcttggaatacaggcgtgagccaccacagctggccttcttcacgtctcttctgagcatagtgcctgagaacccggaattgtccaggtggctcacacagcagcagggttcatggagataaaagcccttcttgaagaaagtggccccccagggctaaggaacttgatgaagaaaccaaacagtcccgtgacgtcttagcaagctagcaacgtggcctgagctttgctttgctgttggatgtgagctcttccactgcaggcggcctgcacctgggctgggcaggaacaagtccaaccgcaggtaccctggacgtgagccttgatcgtcccacgtgtggccagggggcctgtgagggtgcacgtgcacacacatgcacacacagacacacacgtgcacgtacaccagcaggtgcatgccctgccgctgaacccctgggggagggacaggcccagtcacaggggcaggcaccagaggacaaggccacggagggctccgcatggcttcggctgctgccctgcagtcggtcccagcctcatagcacttgccaggtggagccgctccgaagtcttaggatccagggatgggaaatgccagcaaggtcacatgtgtgacctcacttcacagctgctggcgcagcctctgcttgaacccagccagatcccagcgtgcctctactgtctgaattggcccattccatcgatcacagatggggagcacaagtgtgtttccgtgggacagtgtgttacgggggaggcttggatttgggggtctggaggcctctagatgaaaacccaaaactcactccttaggacctgtgtggcccaggccaagaaggttcttagcctccatgcccttccgtgttctagcctgtaaggtggggatggtcatcaggacgatcagcgtacctcctgggcttaggccgtgacaggtgctcagcaagtggctactgtcccggcagacccgggggcatcccaaacctgcatctgtcctgggccctgcctgtgccagcatggaggggaggggctgtggtagtggcctttgcttcctctccccttggaacctttcatgagcccccagtgtctcctcctccccatcattcatcttttcctgtcacttctttcttttttttttttttttttttgagacggagtctcgctctgtcccccaggctggagtacagtggcgcaatctcggctcactgcaagctccacctcccgggttcaagccattctcctgtctcagcctcccgagtagctgggactacaggcgcctgccaccatgcccagctaattttttgtatttttagtagagacggggtttcaccatgttagccaggatggtttcaatctcctgacctcgtgatccacccacctcggcctcccaaagtgctgggattacaggcgtgagccactgcgcctggcctcctgtcacttcttaaatccttttggtctgggtgcagtggttcacacctgtaagcctcacactttgggaggccaaggcagaggatcacttgagcctaggagttcaagaccagtctgggcaacatagcaagaccccatttctaaaaaaaaaaaaaaaaattttttttttaattggccagaaactgtggctcatgcctgtaataccagcactttgggaggctgaggtgggaggatcacttgagcctaggatttcaagaccagcctgggcaacatagcaagaccccatctctacaaaacaaaaatttttttttaattggctgggcaccgtggctcatgcctgtaatcccagcactttgggaggccgagatgggaggatcacttgagctcaggagttcgagaccagctcaggcaacatggtgagaccccatctctactaaaaatatatatatatggctgggcatggtggctcatgcctgtaatcccagcattttgggagcagaggtggacaaatcacctgaggtcacgaatttgagaccagcctggccaacatggtgaaaccccatctctactgaaaatacaaaaattcgccaggcatggtggtgggagcctgtaattccagctactcgggaggctgaggcaggagaatcgcttgaacctgggaggtggaggttgcagtgagctgagattgcactactgcactccggcctgggcctcagaatgatacaccatctcaaaaataaataaattacatatatatatacatacatatatatacatatatacatatacatatatacatatatacacacatatatacatatatacacatatatacacatatatacatatatgtgtgtgtgtgtgtgtgtatgtatgtatatatatatatatatatatatatatatatatatatatataaaaaatagctgggcataatggtgcacacctatggtcccagctacttgggagaccgagatgggaggattacttgaacccagggggcggagtttgcagtaagccaagattgtgccgctgcacttcagcctgggtgacagagcaagatcctgtctcagaaacaaaaaatccaccaggtgtggtggcgtgcacctgtagtcccatctacttgagaggctgaggtgggaggatcacttgagcccaggaggttgaggctgcagtgagccatgatcgtgccactgcgctccagcctgggcaacacagtgaaattctatctcaaaaaaagaaaatcacccctttttgctgggctgggcctcctttgcgagtgcagtgcggttcatcccttagcatctctgaggtgtgtgccccgccgtgtccctccacaccgctgtgacactgctgctcttctgcagagttgatagcacggggcatggtgaccgacgtcatcccccccagtaaaggcgcacgaggagggcgggctcctgaccggcctcagcaggactgtgtccaccagagcaacacacccaaagccagggttctggctgcagctcctcagaccagtgggaggtcattagacccgcaggagcgcacgtgactccgggaagtgggatgggaccgtgttgccggaaaagccggatgagcaaaggcgggcaagcccaaggtgttcagacccggccggagaggtgggagacggggaacacggcagctgcacagctctcccggggagagtccgcgtgtggtgggagggacccagcccgactccctaggagctggttttcatgtttggggcccacgaagaccttgagctgccttcaggaaggattgtcacgcggggcagggtgtgtaagcagatgagctgcgctgtgccagcctgtgctcctctgcccacgcagcaggccgtacattccgcacccgggatgcctgggacgcccacaggccttggccaggctcggcttgtggagtgcagagcaagggctggtggagctcctcgggcgcttggagccagggagtgtgcgcagtggcaaggggggaccttagagacaagcaaatgctaaatgatctgaaatcgggattggagatggggcaggggagagtcggctctagacaggcatgtccagcctgtttgcaaaacccctgcaagatctaaggacatccaggggacagacatcgtgagcatggggttcggctcccatgtgcctcttgtcatggagggacttgaagtcctgagctatgccagaggtcagaggacctagaaggacccacggcatgtctgtcctgggtgcctgcagagctgggtgggccttgcccgcagtgtgtccgggaaggggctgcagaactgggtgggccttgcccgcagtgtgtctgggaaggggctgtacacctgtccccatggcttcccttcagcttctctgcgattctcagtcgcccgtcgggaccagaagggattctagagcatactttcccctcaagcagttgtttgtttgtttgttttttggagacagaatctcgctctgtctcccaggctggagtgcagtggcgtgatctcagctcactgcaacctccgcctcttgggttcaagcgattcttctgcctcagcctcccaagtagctaggattacaggcacgcaccaccatgcccgggtaatttttttttttagtagagacgggggtttcaccatgttggccaggctggtctcgaactcctgacccctcaggtgatccacccacctcggccttccaaagcgctgggattacaggcgtggtcaccgtgcctggctcaagcagcttttaaatgcaggacttccgcccccgaaattccaactcacacagctgtaattacatggtcagttccacctgcccaggactttatacgaaacctgacccccctcggccgggcgcggtggctcatgcctgtaatcccagcactttgggaggccaaggagggtggatcacgaggtcaggagattgagaccatcctggctaacacggtgaaatcccgtctctactaaaaatacaaaaaattagccgggcgtggtggcaggcgcctgtagtcccagctacttgggaggctgaggcaggagaatggtgtgaatgcgggaggcggagcttgcagtgagccgagatagcgccactgcaccccggcctgggcgaaagagtgagactccgtctcaaaaaaaaagaaacctgacccccctcaggctggtccaaagccatcggatgtaccctctcctcagaacaaacaggaaggtggctgccacttccagcggcttcacggcagagcttgtgcaatcgcaggacacagcctggatggccgaagacagcagggcagctgtgaacggtctatgccatgtctcctgcccaaacccttttctgctgctcccaaccagaaaataaggatggagacagcctgcagcccctcctttgccagtgaaagatctggtggggaggcgtggggtctctgggggtcggggggacaggtatgacgatgctggtgcccatctctctggggcattccgccccctttggacttcattgtccctgctgtgtcaccaggggccctgccacaccctgcctccgagtgtgtggggtctgtacctgctttgcccccactggccgctttctccaggacagccatgaacatctccagtgtcctcggagcaaggaaggaatgcttcctggagcagaagtggccacaatgacgctaggtcagcagatggccgcagaggcctgggcagtgaccggtcggagaacaaagcctgaggtgttcccaggccggtttccacgggagtcttggcagtgacccgtgcacggaggagacgcgtgccttcctggccccccagtttggattcctggtgcctctaaggtctgctgatggcagagctgcacccgggtgagcacaacccaggatggggtagggggtggctcttcacattccctgtcctcagtgacagaaactcacttttattatcctaaactctgtttttgcttagaatttggggcaacttgccctgaaataacccttcccttgtccttgggatgaggggactctgtcctcagggcataatcatgtagaaataggtcatcctgcaggtccccccaggaaattcctgagaggaaagagggaacccactttgagctgcctgggtcattcctccagcacgtcccctcccagccccagcctgcgctggagactggtctgagttcaaaggccgcgccttcttcagagaacagccactgctggcagagtcaggcgtcccatcccctccaagacagctgggttccctggggctgtgggaaggcgggtgtggggagatgaccagcggtttctggtcctgtgtgcccagcccctatcagcccacagagcctcaccgtggtgtctcccctgcccaccagcacacggagggagcaggaagggatgcctgccagaggcttcgcccttagtcggggaaggaagtgatcccattccatcttctggtccgaagccttttccttcttcagggtgggcctgtccacacccgcccccgaggtggctcttccgtctctcccgcaggtgcaggtgggacccacaggctgcagagtcagacctgagggaaaatcccgacttcagaagtcatttctcagcctcctcatcagaaaatgaaaacccaaaccaaaagctccccagaaggctgagggaaaggagccgggctcccatccgacaactcactgggccataagcacaacctggggtgtggggagaagccacagctctgccctgggggtctccagggtacctgggccagaagcctgcagtggcggcccggacagtgggggcccaggcagcggttcacgaggagaccttggatgagagcttgtcccttcctttctgcagcagccactaaggaaggcgcagagggactgggtatggtggctgacacctgtaatcccagcactttcggacgctgaggcaggaggatctcctgaggccaggagttcaagaccagcctgggcaacatggtgaaaccctgtctctacaaaaataaaaaaattggctgggcacagtgcctaatgcctgtaatcccagcactttgggaagctgaggcaggtggatcacctgaggtcaggagttcgagaccagcctgaccaacatggagaaaccctgtctctattaaaaatgcaaaatcggccaggcatggtggcacatgcctgtaatcccagctaattgggaggctgaggcaggagaatcgcttgaacccgggaggcaggggttgcggtgagccaagatcgtgccactgcactccagcctgggcaacaagagcgaaactctgtctcaaaaaaaaaaaaaaaaaaattagcctggcatggttgtgcatacctgtagtcccagctactcgggaggatgaagtgagaggatcgcttgagcccaggagttcaaggctgcatgaaccacaaatgtgccactgtaccccagcccacacaatggagtgagaccctgtcttaaaataagaatagcaataacaataaaaaggaacagagacaaagccacacggtgctctctgactgccgagtcccaggacttggtacaaaattgcgagggatctttgaaactcccaacagcagcccacatgctacccgatgaggaagccggggaccagaccaaggacactgaccatgcccaagccggggaccagaccaaggacactgaccatgcccaagccagggaccagaccaaggacactgaccatgcccaagccgtccagctagttcagagtcaagtggaaataaccagggcgggagcacagagagccacatcccagtggctccagatcctggtgtcggacagctgggtgcttggggaactgccgttcattcacagggctttgcggctgagctcagaacttgatcttgactttgatgggtggaaggaatgtgagtgcctggattaaagcggattgtcacgtaggccacaggattcacgtgggtagagacccctgggcagcaaggagcagcctccagcccaagttaaggcgtggagacagtgagctgggcgtgccatccgcgtgtgccatcctcaaaacccagcaagtgctccctcctgacctcaagtgatccactcgcttcggcctcccaaaatgctgggattacaggcgtgagccactaactaccctcagcaaggtttccagttttttgatgtatgcatttattgttattaacttacctcttaatgcgtctactgtgtcccagaagttttggcacattgtgtttctatttttgtttgtttcaaggaatttaatatttttaaaagttttttcattgttaaaaatatggatcacttcatgaatttgcacgtttccttgcaggggtcatgctaatcttctctatcatttccactttaggatattgccacggtttctacaggactgaacaaagggggaccaacgcagaaatgaaaacttaaaacaaaagtaagtattttaaaggaaggggccaggggaagaagaagagcactcgcagcttccggtgagcatgaacagcacctgagcttccacagcccttcctatttgttgagtagaatgagcagggaggaggaggtaatgattgctcagctgcttaattgatcacaggtgcatattattactaacagccttcagatgtgccctgtagctaatcacaagaaacacttgtgcctgggtcgtgactgcctcagtattccttctgggcggcagaagcagtttgtcagtttaccagtttgccaacgttctgcttttctgagaacagtttgctgtttacccacataccctccagtggtatactgagttgatcaccaccctcactttctgcagcagccactaaggaaggcgcagagggacttcctttcggcctgcaacagtatctgtgctgcccaagtgagtatggaattttaaattttcattcttagtctcttccttcatccactggtcattcaggagcatgttgtttaatttccatgtatttgtacagtttcaaatgttcctcttgttattgctttctggttttgttgcactgtggtcagataagatacctggtatcattttgatttttaaaacattgtagagacatgttttgtgtcttaacatattgtcaatcctggagaatctcccatgtgctgatgaaaagaatgtatttttcagctgttgagtgaaacgttctgtaaaggtctgtcaggtccatttggtctacggtgtagtttcaatccaatgtttctttgttaatcttctatctagatgatctttttaatgctgagagaggggttttagagtccaactattattctattggggtctatctctccctttagatctattaataataatatttgctttatatacctgggtaccctggtgttgggtgcatatatatttttaagtgttatattcccttgccaaattaacccccttattattatacagcgtctttgtctctttttatagcttttgaagtctgttttgtctaatataagtacagttactcctgctcacttttggtttccatttttgtggaatatttttttccatcccttcacttttagcctatatgtttcttcacacatgaggtgagtttcttgtaggcagcgtatagctgggtctttttaaaaatccattcatgccgggtgcagtggttcatgcctgtaattccagcattttggggggctgaggggggatgattgcttgagctcaggagttcaagaccagcctggacaacatagggagaccccatctctacaaaataatttaagaaattagctaggtgtggtggtgcatgcctgtgatcacagctagttgtgaggctgataagggagcatcacttgggcctgggaggttgagggtgcagtgagccatgattatgccattgcactccagcctgggtgaaagagtgagatcctatcttgaatgagtgaataaataaataaatccattcagccagtctatatcatttaaatgggggaatttaatccatttacatttagggttattactgataggtaaggatttactcctatcatgttgttgatgttttctgattattttctatatcagaaaataatcggaagtgcacaccttgtgctcctagaccagggcagtgctgctgtgtgaattcctggcagctctccaagctgggctcagggcttgcaaggactgtgggattctcctgtcgtaaggactgtaggtgttggtggtggcaatgggggctgatgaggatcttctacttacctttgccccgcaagggggtgtccctcttgactcccagcagattcaatccaggtggaggagatggagctgcagggccaggtgcctcgacactgccctccaatttgaagggcttccaatcaccaaaggtgtgtcttttctccctgctgcgcttcacattctccctctgacactccagtcaaatcttagctatttattcattgtcttggtcctttcttgtggaggacaagtgccaggggtctctagtcagccaccctgatgacattatgctctgtggttttaatttgaattttcctgcaatgcaaataattagtcatgcttagtgatgagtgtttttttatatgcctgttggtcagctgcatgtcttcttttgagaaatggctattccttttgcccatttttaagattgggttgtttcttgttgttcttttagttccatataaataaatatatatgtattatatatatatatatatttttttgagacagagcctcactgtgtcacccaggctggagagcagcaatgccatctcgactcactgcaatctccacctcctgggttcaagtgattctcctgccttagcctcccaagtagctgggactacaggcgcctgccaccaagccaggctaatttttttgtatttttggtagagacagggtttcgctatgttggccaggctggtcttgaactcctgacctcaggtgatccgcctgcctcggcctcccaaagtgctgggattataggcgtgagccactgcacccggccccttatatattttggatattaactctttatcggatgcatggtttgcaaatactttctcctattttgtaggctttctcctcactctgtcgattgtttccttcgctgtgcagaagccttttagtttgatgtaatcccatttgtctatttttgcttttgtttcctatgcttctgggtcatatccaaacaaatgattgcccagatcattgtcatggagcctttccctacgttttcttctagtggcttcacatgttcgggttttgtgttaagtctttaatccattttgagttgaattttgtacatggtatgagataagcgtccaatttcattctgcatgtggatatccaggtttcctggcaccactgattggagacactgtcctttttcggagtagtgaatacactcccatcgttcagacattgcagttatccagcccagtgcaaaggagaggcctccgtctccccagccctgtctgcctgtgtcctccacaggctggagcttggctggtgcggtgcccatgatacctactgtgagtggctgtcagtctgtttcaattggtcaattcctgtgctatattggccagcaagtatcgtaagtcttacccctgcttgtagatacatatttgtattagtgtatgtttccagtaattccttttttttttttttctgagacagggtctcattctgttgcccaggctgaagtgcagtggtcaacctttgctcactgcagcctcaacttgttgggctcaagcaatcctcccatctcagcctccccagtggctgggattacagatgtgtaccaccacacctggctaacttattttttggtagacatgggggtctctctatgttgcccaggctggtctcaaactcctggccccaaatgatcctcctgtctcagcctcccgaagtgctgagactacaggcgtgaacactgcacctggccttattctttcttttcaaaaaatggacatgcttggctgggtggctctctggaagcttccttggcagcttagtgtatgtcagtgtttagaaatgttccactgccatgtggtgccgcacccccattgctgggtcaggaacgtgtccctcatccaccttattgctgatgctgttggtgtctcagaagggtttactatttctgctcatgctgggttggactaagagagggaaaaccctcctatcactagcaggtgttggcctctccctctcctgacatgagaatgcatcttaaataaagacctgcctctttctcccatgcctgaaaagggccaagatgctctggctgaagttgccaggaggtcagcacctcttcctttcccctgcattctggggattgccccccgccactgtctctggttgaatgtgtctgtgcaaacctctgtagtgatctctgcaaagggaggaggggagtggggccgggactaagcctgggacagaggtgggagctgggccagggggagcctcccttggggccaggcagtggcaagagccacgtggaaaaaagcaagtccctttgatcagaaaacccactgctgtccctgcaccagcctgggccaggacgggacagatgggccttggcaagcctcccacggacaccacgcagcctcaccccacagcagtcagccgccttaggtctgcagctcacagcccatcctgccagggacagttggaagactgcctggaggaggcctttggttcccaaaaaagctgggctgaggccacaaggccccctgcagaccctcgtcctcagacttgtttccacatttatttaaaggatgcagggaggagctggttttatattaataacaattaagtactcttcatgttcaaaacagaacacttattacttgcaattttctgagtcagccaagttcccagccagtgtattaaacatgtaacgtttaggtaatgagatgaactcttgatttcagtaccaggccgtgggtgcatctctcctagaattccggcagccatcgggcccctctcagggctgggggctggacgacaggggagcaggagagatgcgtccatcacagagccatctgccttcgaggcagagtgtgcatggactggggtacaggtggtttatttgaggtgggcccagagagagggggaagggagtggggatggtggggtgtagaggatgggggtaagacagggactgtcactgagctagttcccatcatagttcgacctggccagggctgtgaacaaagtacctctgagcagagggaggtttgcatgaccacccacctaccccagggcggccatcgtggagacagggcctgctggtgtccattttccaacgcttcctggctgagcctgtttctgagcccatggagaaggttctaggcctgcggcagaaaagtggggcccccaactagtctcagaggagggaccctaactgtctggtgccacccagctgcacctgaaatcagagtgagctgaaggcatgtggcctggggcacccaatgcgtctgttagggtctgagtgcaccagggaggactgttctcttgtcaccactcaggccaccgtgactggacagttttcgcattgtaccatttacgtaggaagagatgtagaaactgggctagctgacaccaccctccaggctattcgagtgatgttttggaggttggcttactggcagctcagccctcaaccagctcttccctcttgccaccttcttctgtgcaagggggatgttatatcacccgctgttaggtgtgccaggggttggcgtgaaaggcattggtgctgctcctatgtctgagccaggccacagccggcttctgccatctgggcagtgggcggctccctggtccctgagaacagcaaggaaaaggtggggcacagatgagggcctccagcagggtggctgctcctgccccagtcccgaaccccaccgcgcagggacacaagcgggggacatgaggccaaggcacagacaggcctcttggggagtgacctctgcttggagagggagcacgagaatccagactgtcaggaagccaagaaagacccaactgagttcaaaataggagcacgggccaggcacggtggctcacgcctgtaatcccagcactttgggaggctgaggcgggcagatcacgaggtcaggagattgagaccatcctggctaacacggtgaaaccccgtctctactaaaaaaaataaaaataaaaaaaattagccgggcgtggtggcgggcacctgtagtcccagctactcgggaggctgaggcaggagaatggcgtgaacccgggagaggtggagcttgcagtgagccgagattgcgccattgcactccagcctaggcgacagagtgagactccgtctcaaaaaaaaaaaaaaaaaaaaatagcatggggcatagtgtttggagcagccgtccacagcgccaggcttgattccatcagcgctacttatttacatcacactatacagcctaaaacctgggaagagcgtattgtttctgcacaagctcaggtgggagcaggttctttctgaagacaccacacagtgacagcagcagttgacagtgtgccatgcacaagattgagactcagcaagaggagaggcgccaggctaaaggccgggcatacccttgctgtgccaggggacctgccattgcctcttgtacgaaatggggtgatggctgcagtcctggcaactgtgttccgggcgcggccaagccccagtgggcctgatctctgagctgccatggggcgagccctgggcctctgtctgtctctcctctgcgacatggagctaggatacctcctcccaggctttttgtaggcattaaaataattcaaggccaggcatcggtggctcacgcctataatctcagcattttgggaggcccaggcaggtggatcacctgagatcaggagttcgagatcagcccgggcaacatggtgaaaccccgtctctactaaaaatacaaaaattagctgggcgtgatggcgtgtgcctgtaatcccagctcctcgggaggctgaggcaggggaattgcttgaacctgggaggcggaggttgcagtgagctgagattgcaccactgcactccagcctgggcaacagagccagactctgtctcaaaaaaaaaaatatatatataacataaaaaaataaataaatccaggtgtgttgactgcatagaatacatgttttaaaggggggaaattctatcataatccctgttttcagatgagacaacagatgcaggagacatgaagagtaattgagaatccatgtggccctgctccaggatctgctgcttaaccacagtgtggctccactttttacaaacagggaagctccctatggactgcgtgggctgggtgtggtggcatgcgcctgttatcccagcactttgggaggccaaggtgggaggatcacttgaaccaaggagatggaggctgcagtgagctatgaatgtaccaccacactccagagtgagtgacagagcaactgtgtctcaaaaaaaaaaaaaaaagatggaaaatgcagatatgtgggtaaaagggggaagaaactgcagagtctgtgacccaatcatagtcactgatactgttttgatgaatttccttccaatctcttttgtaatgatagtggggtggagttttttgcttttatgtagttgttattatatcacatcacttttctttttttgagacagggtcttgctctgttgcccaggctggagttcagtagtgcagtctaggctcactgcagcctccacctcccaggctcaggatcctcccacctcagcctcccgagtagctgggaacacagatgcagccaccacacccggctaatttttgtattttttgtagagacagggtcttgctatgtggcccaggctggtctcaaactcctgggctcaagtgattctcccaccttggactcccaaagtgctgggactacaggtgtgagccaccgtgcctggccttcactttcaagatttttataaactgacgttttaagtatttcccagattatcataagcccctctaaaaagtgtttatagatggagagggtccaagtgcagctctgttatgtggatatattgtatactggtgagctctggcatctagtgcacccgtcacccacgtagcaaacatcgtgctcaacaagtaattccacaaacattcacaagcctgttctaaacaccattttgacagtgacacaatagttcatcaaatggacaaagcatggttcatgtgacacaggctgcgcctctggtcccagctaacagttgttgacgtgcaggttgtttccagttgtttgctcccgcaaagcaatgctgcaacatgtgtttttacccataaaggtttgggagagattttgcttcctcaaagagctctagaagtggaattgctggctcaaaggacgaaaggttggaactgctttttaaaaaaccaacacctggccaggcgcagtggctcacgcctgtaatcccagcactttgaaaggccgaggcaggcagatcacttcaggccaggagttcgagatcagcctggccaacatggggactccatctgctgaaaatacaaaaattagctgggtgtggcggtgcatgcctgtaatcccaactacttgggaggctgaggcaggagaatcacttgaacccgggaggcggaggttgcagtgagcagagatcatgccactgcactccagcctgggcgacagagactccatctcaaaaacaaacaaacaaaggtgacaccttagagaatctcccaccgagccccaggaggcagtatcttcccttttttggactatttgctcacctgggatattatttatggagggattggttaaatggacggatgaaaatgcgcatcaaaaaatatctgcaccaaggttgggctcacacctgtcattccagcactttgggctgaggtgggaggactgcttgagctcagagttcaagaccagcctgggcaacatggtgagaccccatctctacaaaaaaatacaaaaattagctgagtgtggtggctgtgcctgtaatcccagctactcaggaggatgaggtaggagaatctcttgaacccaggaagcggaggttgcagtgagcatagatcacaccaccatagttcagcctgggcaacagtgagatcccgtctcaaaaaaaaccaaaaaccataaactgcaccggactcaggactggctttccctgcacccggagcggcttctagaacgcctggtgagcccaagaggaggaagcgcgcggtgaaacactgaaagccacacacagtgtgaaaactcacgtgattactttaaagttacctggctttctattaaaaatgtgaggctgggcgcggtggctcgtgcctgtaatctctgcactttgggaggctgaggtgggcagatcacctgaggtcaggagttcaagactagcctggccaacatggtgaaaccccatctctactaaaaatacaaaaaattatctgggcatggtggtgggtgcctgtaatcccagctactcaggagggtgaggcaggagaatcgcttgaacccaggaggcggaggttgcagtgagccgagatcatgctactgcactccagcctggacagcagagtgagacggcgtctcaaaaaagaacaattttgagatgacaatgggttgacgtgtggtataagaagtaatccagggaggtcttgtgcacctttcctgagtttccccagtggtgacgtttcgtaacattggatcacagtgtcacagccaggtattgacgtggacacagtccagatccagaacattctgtttccgcaggagccactctgttgccctcttctagccacaccctcctccctccttaccccacacccctgtggcccctggcaaacacttgtctgttctccatttctataattttgttatttcaagatgttggataaaagcaactgcacggcgtgtcaccttttggggctgaaggggctttgtgttttgtttctgagacaaggtctctctctgttgcccaggctggagtgcagtggcccaatcacagctcactgcaacctcggccgacctggctcaaacaatcctcccacctcagcctcccaagtagttgggactacaggcacatgccaccaggcccagctaggttttgtattttttgtagggacgagggtctccctatgttgctcaggctgttcttgaactcccgagttcaaacgatcctcctgcctgagcctcccacagtgctgggattccaggcacagcccccgcacctgacctggaaggtttttactcagcattattctctggaagttcctccaggcctttgtggggatggtttgttcctttctgctgctgagtagtattctgggtgtggatgggccacactgtttgatgattcagaggctgagggatgtctggattgtgtccggttctgggcagcttgctgtgaacattcactgactggcccttccttttgccctctgtgcagagggcccgagcagtccctctggttagataaggcagacacaatgtcccaatacataatttaacaggctctttgcagcctggagacgatgtaatgggttaccaggaaaaaccatttgagttcaagttccagcaacttttcaaaaacaataaaacaaaataaaaaacaccccaaatgctgcctcatgaaaaaaggtactaaaaaaaaaaaaaaaagaatgaacatcgattgacaggactagcatcatttcaccatgattcattaaaagaaagtgccaaaccagtgtttgtgctgaattcaagcattttctaaattcccaagtggaaaaaaaaaatctcttataggtctgctcagagggaaaataggcttgcagtccacttactgcccacgcaccaaaggctgcctggaccagagccggtgggattggaggaggggattctgcctttgcctcccttcctccagaaagaacactccctaacgtgggagcccatccagccgcacaacgctgtgtccacgtcttcgggaaggggaatggctagtgtctgtcttctcagagcagctggactcagttctctgtgagaacagtacaaagacatagatattcctcggcttggagtctacacttggtattgtcgggtttttattttttatttacttattttttgttttttgagacagagtctagctctgttccccaggctggagcgcagtggtgcaatctcggctcactgcaacctccgcctcccgggttcaagcgattctcctgcttcagcctcccaagtagctgggattacaggtgcacgccaccacgcctggctaattttttgtatttttagtagagacggggttttaccatgttggccaggctggtctcggactcctgactcctgaggcccacctcagcctcccaaagcactgggattacaggcatgagccaccgtgcctggcctcgtcagggtttttaattataaatttaaattttatcgatttgagtacatgtgaagtggcatctcattttcattttaacttgcatttccctgatgtctaatgagcgctgagtgtcttttcctgacataactggtcctttctgtctttctcctgttgttctttccctgacttcttttggattagtcagatattttctattatttctcttttctttattggcttcttagccaaaccccttttgttcattttttccctagtgctttttctcctgggcacagactacgtatgcctcacatatcaaatttaatgtagggtcaatattgtatcacttcagtcttccctcttcatacataaccctttgcatcttgcacctcacacctggagttccacacttcacagtgtgaggagcttatcagtgggttacctctcaccatccatccttcacactgtccttaccttttacttctacacacactgtagaagtatcacaagctattgtttgttttaaacagtcagtggtctcttaaagaaattatgagaagggccgggtgcagtggcttatgcctgtaacccagcactttgggaggccaaggtgggcagatcacctaaggtcaggagttcaaggccagcctggggaagaccccctgccgtctctacaaaaaattaaaaaattagctggcatggtggtacgtgcctgtggtcccagctacttgggaggctgtagtgggaggatggcttgaagccagaagactgaggctacagtgagccgtgactgtgcccctgcacgccagcctgggcgacagagcaagaccctgtccccccaccaaaacattttttttctcttgatctatttcaccagtttgagtatgatatgcctgcatgtaattttctttgtatgtgttctcttcaggttttgctgaatttcttgatctgtaaatcagtatttttcaccacgtgtttggatttggagccatcattttgcaaaaatgtttccttcctagactcatactctccttctggagctccgatcacacatgcttttggccatttcatactgtcccataggtctctgaggttctctccacttttcttcaacttttttctcttcttcagattaaataatttctatccatctgccttcaagatcccaaactcctgttttctccaatctgttaatccaattcagtgaaattttcatttctgttattgtacttttcagttctagacttttcttttgattcttttagatactttgttattctgctgtgaatttctgattctttactcattaagacaatattttcatttaatcctttggacatattatttttatttattttgagatggagtcttgctctgtcacccaggctggagtgcagtggcactatcttggctcactgtaacctccacctcccggattcaagcgattctcctgcttcagctttccgagtagctggggctacaggcgtgcgccaccacacccagctaatttttgtgtttttagtagagatggggtttcaccatgttggccaggctgatctcaaactcctgggctcaagtgatctgcccacctcggcctcccaaatttctgggattacaggtgtgagccaccgtgcccagcctcctttggacatatgtagagctgctttagaatctttgtaaatacagaatctggttcattgtagggggattggtttctgttaactgctttttttttttcttaactatggcttacgttttcctctttctttgtatgtttagtgatttttgtttttttagtgtatattcaacactgataaataacaaatgagggagactcagggtgctcttccactgaaaaatcctgactttcgttctagtttgtagttccattactggacgtaccatgctgggctgtgtaggcttagctttaggctctgtttactgagcaatgtcccaggtgtctcccaggcccctcttacttggcaggacttaacctccaaactctgaccgtcttgtggatcgggtcagggttttgctttagacgttgttaaggcgggcctggagtagtccttattctaggggagggactggcaacctctggctcacaagccacatgtgttgatggcctgtttttgtacagcacttaaagccaggaatggcttttatatttttaaagagttgtttaaaaaaaaaaaaaaaacaagcaaaaatatgaaacaaaaactgcatgtggcccacacaacctaaaatacttatctgggccctttataggtcgtttgctgacccctgggaatgtgattctcaatctagtgtctcagctcaatgtcctcagtgttaatggcattaaaaaggtcttgactgggcacggtggctcgtactcgtcatcccagcactttgggaggattaggcaggaggactgcttgaggccaggagttcaagaccagcctgggcaacagagtgggaccctctctctacaaaaaaagaaaaaattagccgggcgtggtggcactcacctgtggtcccaactacttgggaggctgaggtgggaggatcacttgagcccagaagttctaggctgcactgagataacgatcaaaccactgcaccccagcctaggtgacagaacaagactgtctgaaaagaaaacaaaacggaaagtcctttcctgtagcactactggacctctagtctttgtgccatcctcaactctgtaacagccgcttcctggtaaacccatagagtcgtcccacacgtgtagtccagcctaggccaaggactttcagggaaccctacatcgacttcggctccccactcttgctaagcttcttcccctccagtgccctgccttgccggcctgctgctttagctgcccagaagtctggtctcttgcctctcacaccattacagtgcaccacactacactatgttcacacatttagcagctgtgttcacacccaaactatctcatatatacattttgttaaaaaaaacttcaggactctctaaacttatgatgccaagggtgaagttaagccctggagactgagtcagtagcaagtttgcaattctgcttcttcgattacagtttaatgctcttcctccttgttcttgagcacaagtgtcttcctcattgtggctgctctgtaaatcagggctccccgaccgccagggccacagacacataccggtcaggccacacagcaggaggtgagcttcaggccagggagcaaagcttcatctgtatttacagctgctccccatcgctggcattaccgcctgagctccgcctcctgtcaggtcagcagcagcgctggattctcctaggagggtgaaccctgttgtgaactgcacattggaggggtctaggttgcgtgctccttatgagaatctcatccctaatgatgtgtccctggcttccatcatccctagatgtgaccgtccagttgcaggaaaacaagctcagggctcccactgattccacattatgggaagttgtattttattacatattacaacataaaaataataaagtgcacaataaatgaaatgtgtttgaatcgtcctgaaaccaccccaactttgtctgtggaaaaactgcattctatgaaactggtccctggtgccaaaaaggttggggactgctgctgttaatgactaagaaagaccaggtctcccccttcccatttggtgatttttgttacagattagctgtctccattgtcctgtacctgacttagaccagacagcacagagaccccaggactgtttcatcttcagtgggtccccaaagaaaaagaccacctcgactaaacagactgttgtaactatgcattaggccttatacagaaaagacgctgaaattcggttaggcttcccgagacgctggctatagaaacgaccccaaatttctacgtttgagaacactgacttccattctttataatgtttcctgggcgcctcaagcttcgcatttgactaaactctagattctgacccttttgattatttttggttgacagtttttgtcattttatggctgggagtgatggctcacacctgtaatctcaacactttgggaggccaaggctggaggatcacttgagcccaggagtttgaaaccagcctggaaaacatagtgagatcccgacaaaagaaaagaaaagaaaaaaattagctgggcgtggtggctgcccccgtggtcccagttactggcggagggggtggggcggggggaaacaaggcgggaggatcgcttgagcctggaaggtggaggctgcagtgagccgtgtcccgccactgcactccagcctgagccaactgaggaagaccctgctccaaagaaaaaaagaaaaagaaacacccgcgccccgccccccccgtttacgtgcacaagaagcccatatgcagttaagtgtgaggtttattttgtggcattccgaaatgccgagggccaggtccccacaaaaacatttgcggcgtgagggaaacgggaagagcccagcggtaggcggaaggcacgcgccggggacactcagcggcgagggcctgcgggagcccccagcgcgataaggagcccggccggggagcagcggcccgccgcgggacgcccgagctgcggggaacgcgagggcagcgaggccggcgtctctggtccgggagcgtccaggctcgctcaccgcgcgcgaggcccgcctgccgagtcctggcctcagctccggcgcagggcccagcggggcgcccactgccgagggaggaagatggacgtgtcccgggagccccgctccgcctcccacttcccacctcccggtcccgcgcggccggcccgggcgcacttccgtcggaggcgaagcgcggcgaagacccgccccgtgaagcctcgcgcgccccggaaatggtcatgcggcggcgccgaggccggaagtggctgaggccggcagcagcgggcggcagctgcggcgcaaccggctccggagctgcctggcgcggccgggcgggcggcgccgctcaggctcgggctccggctgggcccggcgcggcctcggggctgcccatggggcgcggggggccgggccggtgacgccggacgcccatggacgcctctgaggagccgctgccgccggtgatctacaccatggagaacaagcccatcgtcacctgtgagtgcccggaggcggggagggcgcggcggtcgttgggcgggcccgggccctggcgttatgcacccggcgcccccagaccttcagcccccggcgcgctccgggctgggccgcttcctggaggtgtgaccagggctgcggctgaggcggggccctctgacttttcggggacgccctctgaccttcccgccgggcgacctctgacccctggggggcgccctcgggccggctgcagttggagccggtggaacccggcggactctgcccgggactgggcgcgcgccggcgtcgagggcgaggagcgggggctgccaccgccccgtcccgcccccgttgagccgcgcgcccgggacctgggggccccggcctcttccgccgggcggttttgcccgcgggcgccctttccccgactacggggaagtccttgggggctcgcagagttgcaggcgttggcgaagtaggaacagtttgttgcggggtgaagcgtcaggcagagccgccgggactgctttcgctcctacacacttccccgccgcgcactcaaaccattttacggatgagaaagccgaggctcgggcgcttaggcgagcttgctccccatgaacagcctcccgctcgagtctacactacggacacctggtgcctcttgggtgtcgtgtcctccccgcacccctcctttaatgcatacacaaaggaactgtttttctgttacgggaaaaatgttccctaaattttagaagtgtgactctccagagttaaatacggttaagaacagtgagcttatgggaagtattgaaatgtttgttggttggcttttaggtgacttgcagagaggtgtttcagactgttacgatttttgacctttgacagtattctgtattttcatgcatgtatgcagttagtttttttctagttgtctttcgtgcttggaaaggaagcactctctgttgcaaaatctgggtgcccaggccacagtagactgtatgtcgtgagaactcctgtttccctctcactctgtcagcgggtgtgcacctgctgtgttccttcctgttagatccctgagaaactgtatattgaaggttgaattttgttgcttcagctttaggtgatagacttatttctttccttccttttgctttattttgtctcttctcctctcctcctctctcttttttttctacagagacctagacgagatgatagacttttcttagggaagtggactgtgtctcatttaaaattggagacttgcatagttcagcagtagctgtcttttttcctccccagaatatttgtcagctgaaagtcttttcctactctgcaccttcagccccagagggcagatgtgggtagagctggtctgcaggccctgcaatttcccaggggctttcccagtgctcagggaagatgaagccatgcgcagttcatgttaagttttactgtcttccagaggttgaacatttttctcctaaagtgctgtgcacgttgtgaatgctggatacacattcattgcctgtacggacatccacacatctaattttatcttctacctcctagcttgcttacatttcaatagcaatatgtatttataggcattatgtaaatacatttctgaggagaaagttcctaagctctattggattcaaccataactaaaggggtaaagtttgttatctggttgccagtgttggagatatttaatgtttagttttgtacatgcgtgcatcacggacagctgaaggatgcggttttctttcctacagatttattggattgtcatcttggtggtgggttttttcctgtgttttgagcagcagagtgaatttttttttttccttcttcttcttttttgagacggcgtctttctctgtcgcccaggctggagtgcagtggcatgatctcggccatgatcttggctcactgcaacctctgcctcccgggttcaagcgattctccttcctcggcctcccgagtagctgggattacaggcgcatgctgccatgcccggctaattttttgtttgtttgtttttgttttttttttttttcagtagagacagagtttcaccatgttggtgaggctggtctcgaactcctgaccttgggttgtccacctgcgcagcctcccgaagtgctgggattacaggcttgagcccccacccttggcctcaagcaacatagtgaatgttaatctctgcatggatggtacactgtcctagaaggtgcaaactttcattcattggagtctcagaagagaagggggcttcagtagactgtcaaagttaacttgaaaaatgatcactttaaaagtgaaggtaaaaagctgacttcatacttcccacttgaaattatgttgtggtatatctgggactgaagctttaggaagcacttggcctggtttcactttatgccttcatcttgctcctctctttcagctatacatgttttgaaaggagaaggtggtatgaacaattgctttaaaaaaatccacccagaggctaattaacccttaactttttaatattatgtacatagttctcttagtaggcaacatttttgttttcaaaaatcttttaaattcttacttgaaatggtattacctcagatctgttcattttaaaatgaaagtagagtttatgcatgttgtgaattttttttccatagaatgtataatattttacttcagtgaaaatgcattctgcttagacctttctgggaagaatatagaatgtaactggttcaggtgaatttaaaaactgtgtatatgtagggatagaagaatgaaaagttcccaaagattaagggtaattagaatagattattactttaaaacctagctgattatttcacttcattttattattattatttttttagagatggggtctcgctctgtcacctaggctagagtgcagtggcatggtcatagccgactgcagccttgctgggctcaagtgacccctcccttagcctgccaagtagccagcactacaggtatgacccacctcacctggcctgaattattttaataatattttgaagctctccaaattttttttttttttttctgtctgagacagagtcttgttctcttgcccaggctggagtgcagtggcgcgatctcggctcactgcaacttctgcctcccgggttcagtcgattctcctgcctcagcctcccaagtagctgggattacaggcgtacaccaccatgcccacctaatttttgtattttaatagagacacagtttcaccttgttggccaggcaggtctagaactcctgacctcaggtgacctgcccgcctcggcctcccaaagtgctgggattacaggcgtgagcccccgcacctggccctaaatgttttaatagactttagcccataattaaacctcctgcctaacgggctcctgtgaagagggactagcacagtaggggccttcttaaactcagaactagttacagcttgtaaatactgaagagtgtatgtgaaatgtgcagggatgggagctgaacagttagtggaactaatgctttgacggggttgggtgatgaatgaccgaatcatagcaataggaaaacttgtagtatattttattaatcatgaaaaatgcctggcgtaactgaaacaaatccagcagatccatttggtctaaatttaaattttagcgtagatttgtttttcagccacagggtcagttttctgttttgaaatagacttgggtttctgttccaagggtgtattaggaaagacacgttccttttccagccatctcattcagttagtgacaaagttaatgtaattccagtgatttgtggcttttctttgttgactgtcctcatacctacaatagcacatacctgttattagcttggaattgaatttctctgaacaataatagtaccctccctctaggtgatctgttctcattagtcacatctgttgcctgtttcatttttctgagtttctgtatttggggttccaggtctgatattagaaacttttaaaggggaaaacaggcaacagaaatgagcagatatgtagagcttcgtgtctggttggactttgggattttcccctgtaggttaaaatttttttaattttaatttttattttttgagacggagtcttgctttgttgcccaggctggagtgcagtggtgtgatcttggctaactgcaagctccgcctcccgggttcacgccattctcctgcctcagccttccgagtagctgggactacaggcgcccgccaccacgcctggctaattttttgtatttttagtagagacggggtttcaccgtgtcagccaggatggtcttgatctgaccttgtgatctgcccgcctcagcctcccaaagtgctgggattataggcatgagccaccgcgcccagccaggttaaagtttttaaatttgcacattgaaattttctactaaacctgaaaatgtggtgcttgcgatttaaccatcactagttttactaccagaaaagtcacttgaaatgtctgtttaaatgggtgaatatgttataaatgcagattttgtttcatattgaattctcaaggcaatgttgaaccaaagattgaaaagtaggagaaacattcttcttaggaaatcgcagttgttgcagagagtatgtatttggaggcggggactaaaggcaccaacaaatgtgcttaacttactatgtcatttctacccgagcatggttacaaaccattccatcttgtacgcatgacctcggttcttacataatttcacagacccttagctgtgaaacgggtacagtaccaaccccatcgggttgagaagggtgtgtaaagcactcaggagagtgtcaggattatagtcagtgtgcaaaaaaagttactaaggagaggttcctcaattttctctgttcacaatgcttttagtgtctcggtaatttttttcatggcatctctaggctaaaaggaatacttaaaaattccatttattaagtagttagattccagtaatttattaaatattatgtcctaacaagagctgtttgaaaaaaaatatatataagttggaagaaaaaaatattttcatcattcttcctaattgcagcagtgtgctacgtggggggcaggccctgcgggagctctgtggcacctctcacctgaaggtcggattggacgctgcttctccctttggttttttttttttcttcttctttttggtggtacttgctttttatcagagcagccaccctgttttgcgacgataatgatgtcatcgaaagaagtggagccctgatctgatgttgacactgtgaataccttgtgtggggttcctacaccacaagcattgctgtttccctcataaatttaaaatatctcttggtgcctctctgcgtagtgtgtgggaagcctaggtacacagtttgggaacccgtgctgttagtgttattagcccaactccagggtggatttgaactgatactttagaattgaaaagcttcctttcttttcagctcacacacctactttactacaagatgtgtttctgaagagtttctagtaagttctttatgcaaatgaaatggaaaggtctgattttctttttttttttctttttttcttaagtgctgatgaatctctgaaataatcaagtatgatacagcttgggcaacatagggaattcctatctctacaaaaatgaaaataaaaaagttagccaggtgtggtggtgtgcgcttgtactcccagctacttgggaggccgaggcgggaggatcacttggacctgggacgtcaaggctgcagtgatctgtgattgtacctcacactgcaacctgggtgacagagcaagacctggtctcagaaaaaaaaataaaggctgggcgcagtgactcatggccataatcccagcactttgggaggccaaggtgggtggatcatgaggtcaagagattgagaccaccctggccaacatggtgaaaccccgtctctactaaaaatacaaaaattagctgggcgtggtggctcgcgtctgtagtcccagctactcgggaggttgaggcaggagaattgcttgaatctgggaggcggaggttgcagtgagccgagatcatgccactgcactccagcctggcgtgagactccgtctcaaaaaaaaaaaaaaaaaagtatgtcgggcataacacatgaaccagtctttccttagagagtttttgctgtgtgcttccaccagaggcctgccaactgacagtgtgattgtgtggctcactctggctgagttggttatcttttaatggaaatacaaataactgacttaaggatttttttgtcgtaggaaagtttgttgccagttgacagagtgtcttccctggagtcgcatgccttagtgtgtaagtgtgtggtctccaaaggtattgcacactgatctccaagtactgaccctcccacccccgtgctccactctagacctggtggctttagatctggagttagagaccagcaacggcagaagattacagggtcttttttttttaagacatggtctcactgtgtcgcccagactggagtgcagtggcatgatctcggctcactgcagccttgacctcctggggtcaggtgattctcccacctcaatctcccgagtagctgcttgtgtgccaccatgcccagttaattttttgtattttcagtagagatggggtttcgccatgttgcccaggcacgttttgaactcctggattcaagcaatccgccctctttggcctcccaaagtgctgggattacaggcataagccactgtgcccagacagctgcagggtcttaaacagtcaaaacattcccacctcagtgcctgcctctgtggtgggttgcctcagagcttcctgtggcttcctgtcctgtgtctcaccttctttcttcctcaaatctttcctctatctgctcttaatgtcaaatatagtcacagtattttggccttagagaatatttgtttttaaattaaaaattgataaccttggagtcatttatgacttcttttttctctcacaactgacattatctttgaaatatatctagaatccagctatatatagggcctgcctggataatctgggataatcacatcttgagctcctgaacttaattaagtctacaaagacccctttcccaaataaggtgacattcacaggttttgagggttaggatgttgtggggcaccatgccacctgccgcaccactgtctgtgttagctaccaagcgcgcagtggccggcattcatcaagcgtctttggttttagacagctgcgtctgtctttggaggtttgtccttcgtgtactcctgaccgagggaatgttatcttgacatttgggcttctgggttctagatgtggttacaaggtggggtgatcccttcttaggaaaagtccagcctcttctgtgctctctcccttatgtggctttttggacatttgttacatggtgtttaatttctgaatattattttaggcccctgtttgcaattttttttttttaacagtgaccagggaccattccattgtatgtttggacatttttcttttcttttctttttttttttttgagacagagtctcgctctattgcccaggctggagtgcagtggcgtgatctcggcttactgcaagctccgactccgcctcctgggttcacgctattctcctgcctcagcctcccgagtagctgggactacaggcgcccaccaccacacctggctaatttttttgtatttttagtaaggatggagttcaccgtgttagccaggatggtctcgatctcctgaccttgtgatctgcccgcctcggcctctcaaagtgctggattacaggcatgagccaccgcgcctggcccatttttcttatttttaactgagatctgttagcagtttgaagcgattgtatacatttcagagttagctgggcatggtggtgcgtgcttctagtcctagctacttgggagacaggccagaggatcgcttgagcccaggaatttgaggctgcggtgagccatgtttgtgccacttcactccagtctgggcgacagagtgagaccctgtctcaaaaaacaaaaaacaaaaaaaaacaatttcagggttgaaatttttagcagagccttggaactgacaaccacctgtttggatagtaactttaactcaatctgtagcttgccatttgtgggcactgtcagttcacctagaccagtcagcaagctctaaacatccaggttaatgagaagggccgtcagaagtcattttgaagttgaggagctgagggctggttttgctgtgactggccatgatcagtgtaactgtttagtagcacagctcggaccaatattagcatgtctgatgactcctgctttaccaagtacttagggaaggcagacaccatctgttcacatggaagcagggagtttgtccctaaaattatgcttctgagaaagcctttgccatataattaaataaaaatgtcactttagcattctaagaattgagtaagtaagctatacactagaaatttttagtatagtcttattccaaaattaaattcctattctgagaacttgatacccagcactgtctttgcttctcctgtagtctgttctgtcctttggggatcctgggttgtctagtgtggagtatggaggagttgggctgttttcatcagtgagcaaacatttacggaggacctattacatgccagttactgctgaaggggcttgggttatgtcagagagcaaagatcccaaccctttgagagtttacattctgtcaagaagagatagacaatagacaaataatgttaggtgacaagtgctatggaaaaaagaaaaagagaaggataagggaaatggaagaactgtaacatttcacatattttattataaaagtgcaatatgtatcaaagtagacagaatattataaagagaccctacaaacctttcacccaactacagcaattaggtgaactgcccaatcttgcttctctatacccctcattctccccagtcttatattattttgaagcaaatctcagacatataatttatccacgaatggatgttatggactgaacatttgtgtccctccctacacaccgaagccctgactcccagtgtgctaagaataggagatgggcctttgagaagtaccagggctagatgaggtcaggagggtgggccctttattattggattagatgaggaagagtgagaggacacctcccccttgaaacgaggaaaggccacctgaggataacagcaaggaagtggctgtctgcagtctgtaacacaggcctcaccagaaacctaatctactgacaccttgatctcgggcttcttgacctacagagctatgagaaaatacattgcgattttttttttctttcttagggtcttttcagagagaaaacaaaaaactgttttctaagccacccagtctatggcatttttttttctttttaaaaatttctttctttttttttttctttcatggtattttttaattacacctaaaacgtttctttctttcttttgtttttgtttttgtttttgagatggagtttcgctcttgttgcccaagctggagtgcagtggcacaatctcagctcactgcaacctccgcctctcgggttcaagcaactcttctgcctcagcttcccaagtagctgggattacaggcacatggcaccatgcctggctaaattttttttttttttttttttttttgagatggaatttcactcttgttgcccatgctggagtgcagtggtgcgatcttggctcactgcaacctccgcctcccaggttcaagcgattctcctgcctcagcctcccgagtagctgggattacaggcgtgtgccaccatgcccagctaatttttttttttttttttttttttttacaaagacggggtttgttagtagagatggggtttctccatgttggtcaggcttatctcgaactcccgacctcaggtgatccgcccacctttgcctcccaaagtgctgggattacatgtgtgagccaccatgcctgggcctaaaacgtttcttaataccaaatattcagtgtttaagtttccagtgtgtcttaaatgtccatttttaaaactgtttgaattagtatccaaatacagtttttagataaatcctttaagtctcttaaaatcttcatgttccctctgtctctttttttttctttataacttgatgaacctggctcatttgtcttgaaaaggtcccactgcctagactttggtagttggagctggaggctgggtcagcttcaggctggattttttgtcggcaggactttatcatgggtgttgctgttcttccagcaggtgcgtgatgtccgattacctctccttttggaaattggcagccatttattttcacatcactaattccctaaaggttgcaaaatggtgatattctcatttccctatgtctttttttttttttttttttttttttgagacagagtcttgctctgtcgcccatgctggagtgcagtggctccatcttggctcactgcaagttccacctcccgggttcacgccattcccctgcctcagcctcccgagtagctgggactacaggtgcccgccaccacgccgggctaattttttgtatttttagtagagatggggtttcaccgtgttagccaggatggtctcgatctcctgacctcgtcgtgatcctcccgcctcagcctcccaaagtgctgggattacagatgtgagccaccgcgcccggcctatgtaaccattttcaaagtgagttggttcactggcatctttcagaggtgatcggttggcgtgtttttgttgttcgtttagtatggctgtgaacttaatcattatgaacatacttgatgtgttacagtccattgcattgttgcctcgttggtgagcaggttgttctccctttggccagggagagtctctttcatgttggggtctaagatagaggcatctttgtcagattctttcctatctagcctgacaagatgttccgggctcattttgaacatttaatgccctgatctgcacttagcaattgccaaggagccctgattccttttagtgaaaaatagtatttcaagaccatagtctgcaagcttgggctcctagttgctgtgaggccttttcaataggcagagctaggaatagctaggcatttttgtttgtttgttttttgtttttgttttgttttgttttgagacaggctcttactctgttgcccatgctgtagtgcaatggcacgatctcagcccactgcaacctctgcctctcaggttcaagagattcttgtgcctcagcctcccgagtagtgagtagctgggattacaggtgcatgccatcacatctggctaatttttatatttttagtagagacagggtttcaccgtgttggccaagctggtctcaaattcccgacctcaggtgatccacccaccttggcctcccaaagcattgggattacaggcgtgagccaccgcaccagcctaggaattgttctttgttttttgtatttttaagataaaatacatcataagttcactctttttgatgaaaactcagggctgcagggttttaattaacagctccatcctctgtgttttctcttttccacactgaaaatcctaattctcatgggtacttgaggaggctagagttagaggttccccagctcatgctgcttcagtcacctggagggcttgtggacacacagatggctgggtccattccccatttctgattgaacaggtctgggtggggcctgagaatgagcatttctaacaaatgcccaggtggtgctgatgctgaagggccaggggccactgaatagaacatcacacgattgctcacttgctttcagttgctttatccctcattacatagactctgaataacactattaactccaccatcaacaacaggactagtgaacacaggtctagaactgtttttgacagttcttattggcatttggatgtatcccataaggaatgaacagtcaaattactgtagttttaaagttacttgtcatagctcctctctctgagattataccactaaatgtatatgtatacatttaagttcacttgttttatttttcctgattatttttagggaaaaccttgaaaaaatctaattgctttataactatataaaatatttacttccaaaattaaatctacaaaatgaggtctatttaaagaagccttgtgtatgttctgtcctctccatgctaactcctcccttcctgagtactccatcacagtttttatggttttccttccacgtgaaaaacatccaaacatatttgtatttccctttcttagcttagacattgccagctgcacacactgtcccacctcactttcccccggactccactccacgctaggagtatgttgagatcattctcattccatgatgtcgatattccgtggtttattctgccagtcccctcctggtggaatttgagttgttttgtgttttactgtttccagtagttgtgcacagatagcctgtctgtggcctttccgacgggcctgttgggatggagccctgcagggcgggttgctgggctgaggcaaatggttatgtcactgtgctgatgctgcctcagctccctcctgagtgcttgcaccattgggaaactgcctgtaggcctcgctgagaagccagcccttgaacaaagccagtggcaaaggggaagtctggggaaagaccagtttgggaacccttctgtctaaagccttaaggcattggggtgccaggaacaggagtgtctctttttaacttgtaaatacagtactgtggttcaaactgctacagtaatgctgtgtttatttaaaaaatgtatacactgttaaaggctgattcctcagtattcttatattcagatgcatttatccagtctttttgtttttaaactcttgaattttaagtttgctctctgagggctagagaaggcaacttgtttccttgattagaagagttcattcaacttcttaacattcttggcctgtgtgttcttgtcttttaagttaaaacagaaaaagactgggactttctgtcttttgactagtctttacgtgtagtagttccttttctgcaaatttccacagtaggaaacttgatgaacactaatgtatgggttttcttttgaccccacctacagtgggtagtattgtcatatgactgggtgctgggagagagcagcagagggcaggggtgtgtgtgtgtgtgtgtgtgtgtgtgtgtgtgtgtgtgtgtgtgtgtgtgtgtgtgtgtcagagggaaggtagagaccacaggaaggacctggaggagagccaggctgaatgggtataacgttaagccggcgatgacatggcagggggtgtactgagtacttctttagacttggcctttaaacttggtggtgcagaactgtgggagggttcatttgctttacttctcaaatatgtgccttctaatgaagggaggacagtgtctatgctagaaatgtggagttagttgcctagtcatcttagggggtgactaaaccttgctttctacctagagaatctggataacatctggatccttttttgtgctttctcgttgaccttcactccctgcccccacccccgactgcgaaggcttttcacggacagatactctggcaggagcaccggggaggcttccatacccatgattatgcatttgatgttagttttcaccatgaaagagctcccaatctgaagcattaattttcattactgcctcgacattatacacgaattatagcaaatactttatgcattattgaacaggctgagatgacttcccagtttgtaatctcggatgtttttatcgtccatttgaaagcccgttttaccaaaagccattgaagagaaatgaatgtatggcctatgggcaagcacttgcattcctaggcttgaagacggtgccctctctaatcccgtgttttcaaacatgaactgcctcatagtggattgcagctttcttttgttaataggcttaaagaattattatttctgcaaaattttctgtaaagcaaatcttagataaattatacatttcctttgacttttttgttcaaaaatagaatcatggaaccttgcttggagggccttaaaattagttcatctcttgtctagtccagtcactccgctgcttttagtcgcaactgggagatgacccagcccatggttgaggcccccagctgtgggacactttctgtcattcttcacccccctccaccctcagggtcttctctcgtaggccacagcatttcttgggttgagctaaatccatttctctgtctttctcacccattagtgctctggggcctactaagccctacagaataaagccagcctttgaaaataagacagcccattaggtggccgaggacagtgtcttgttaacaggttgaaacactccacatgtctccaacaatttaagataaagtgagatgtattttattagaaaacttactgttccttttaccaagattatgctaaagaatttgaagaaaaattgtcctgtatcagagtatcagcaaatattcagactccttatgtcaaggtttttttttccaacataaatctccaaatagaagtattgaccttgaaaatatatcatgtcaggtatttaggaaagcgacaaactgactgaacattctgttttgcttagccactctctcagggttataattttgtgatccttttatacttttgtatgagtaagaccatcacggctttgcacgttcaagaattggttcagtaaaaaacagatgacagaaatgttcactctgtctgcggaaggccttttggaacccatattttcagccaaccattgttaaaacaactgctgcagagtaagtagtaaacttgttagaattaagaagttgggaaggagcactgggcagtattgagtcctaagccaagctacctgggttcgaatcccagccttggcgctcatttgcttgatgttgggccaattaggggagttcttgatgtcttggtttccatatgagggttcagggtgagtatgcgtgaagtgccgggggcatagcaggcgcacggtgctgtctggagggacggtaaacaggtggcccttctcttgactgtgttacctagcagctgttccatgaccctaatgtgatggttttgggaggtggggcctttgggaggtgattaggtcatgtggctggagtccccacaaaagggattagtgcccttataaaaaagggccccagagatctcccttgccccttcccccacgtgagggcacagcaagaccaaggtactcaacctgctgaagccttgactcagacttacaccctccagaaatgataaataaatttctgctgtttataagccatcctagtttattgtatgttgttatggcagcctgaacagagtaagacattgaatttattgaaatgttacctgttacactaaatcactgaagtcatctttttgaattctttcccccatcgtgtttcttatttgctttgaacataaaaggttttaaattacacaagtaatgcatgaatacgtgcttgtaaaaatctcagggaatacagtaataattcaggaaatagctaagcctatgttagtaatctgattgcatgtaacagaaaatccaattgcaactgcataaataatccaaaaactgattggtccatgtaatcagaccccagagctctgccccgctttcccggggattctctgaactgggctttcctcagcctgggggcccatccagcggctccaggcggcaccctagaaagagtgcctgtgtccctctgggtggctgctgcttgccattccctctacatgtctcttcccatctggggactccagtgcctgctgttcagccagggtgatgctgtgctcccacagactttagggatccatggcaccccagcttcctgacctgccgcaccctcttatctccctgtctccccagtgggcatgagagccaatggtgggtgtggagacgcacagggatgggggtgtatgtagtgaagttgtgttttgaattgctcttataaattattttgatagatctcctctgtcaccaaaaaaaggagaccttagttattggaataaaaggcctgagttgtctcttaataaatagcctcctgaggcagaacagtgaactgggtgactttgtgaacagggtttctgagtgtgggcacatcagtctcaagccccgttttggctcttaggaaccaccctattaacaagcgagttcctgctgggtttcgctcatgcctctgttgcccgtgggattaaaatgaaaatttagcctggaacgtgctctgcctcgcagttcagcccgcagagctctagtgacttttctgcttaatggttgggttagttcaggaaactacaaagtctgtgttgttaatttaattacctaccgcgtgagccaagattgaattcttttgggctcttaaacttaagctgttcaccatctttttttttgttgtttgtttgtttttttgagacggagtctcgctctgtcgcccgggctggagtgcagtggcgtgatctcggctcactgcaagctccgcctcccgggttcacaccattctcctgcctcagcctcccaagtagctgggactacaggcgcctgccaccacacccagctaattttttgtatttttagtagagacggggtttcaccgtgttgtccaggatgatctctatcacttgaccttgtgatccacccacctcggcctcccaatctgctgggattacaggcgtgagccactgcgcccagctgctcttcaccatctttcatgtgctggttctccataccccattttcaaaggcatctctaatttcataagacttgatgtgaagatttaagagtttattaaaataatggttgtatatgctgagaaaatggtggtgatttttcttcacattgttaatgcagcgcctcagtgggttagaattgggccttcaaatctacgctggggcactgtcttggtgtgctagggctgccgccacagagtcacacagtctgggtggcttagcacaaatgcgctgtgtcacagctctggagaccaggtccaggcagccacagcatgggcctttgtgtcctcatggggccttcctgcgttccttctgtctgtgtgaccaaatcttctctttacacaagtcagttggattagggcccatcctgaagacctcattttaactaagctaccttatcaactttgaagaccttatctgcatatggttatattctgaggtactggattttagggcttcaacaggtaggtttttgtgggacacagttcagcccataacaggtactgaggtcagatggtcccaggtcaaattcctacttaggtcagatgacacttttgccactgttggatgtgctgattgactggtcatcttctaggtgaacacaggttagagagttagtccatgatggaatgcgagagacattgctacttggtagtctccatttagacgagtcttactgtacggcagggttcccagggagaagagcttggagcaggtgttggaggcagttccacttttactctgtacggatgttatttgtatacgtatgtgaagtaactgtattgcaaagatagaatgtgagagagagagcgagagagtgtgtgtgtgtgtgtgtttgtagttttatatagaaaaccaagtggaagaggagaaagcgattccatttagttggcttactttccacttagcaaagagtaatgatttttatacattaatcttggaactgtttaacaggacaacagaaattggcaatcaaagttaagaaaccagaggctaactaaagattttcttcttttcttttattgatgtcttttctttctttttcttttttttttgagatggagtttcgctcttgttgcccaggctggagtgcaatggtgcaatcttggctcactgcaacctccgccttccggttcaagcgattctcctgcctcagcctcccgagtagctaggattacaggcatgcgccaccacgcccggctaattttgtatttttttagtagagacaaggtttctccatgttggtcaggctggtctcaaactccctacctcaggtgatctgcccacctcggcctcccaaaatgctgggattacaggtgtgagccatcacgcctggcctcttttattgatttctaagatgactaccaaataaatgaacaagataaaaagtgataagttcaaacatactgtttttgtgttaacaaaatgtagtaatagtccctttttaaccactatgtgccatgccttgttggaagtgactgacgtgtcttgtctcatttaatcctcaccagagctcctctggccgagctcttctcattttcccatttcccatgtccccgaggcacaggaaggttaaatgatctccccaggtgcagtcagctggtcagtgatggaactgagatggggaccgggcagtgaggttaccagcgccttgcccactcaccgtgccatctgcccggaaatgtcattacccttcctcagtgacttgacattattatatgagtttcaggaggttttttatttttaggcttttgatagcaaaataagcagatgtgttaatggcacacatcaattcccaatgatttcttaaagatcaatataaaagcaatttggaaaatggtttgctaaagtaaagaggatcctctgagtataagaattttagtcatctatattaaaaggttcttttttagccgaagtgtaatacagttatatcatcattttatgagaacaaaatggatttttcatttctattaaagcaaagataaaagctgaattaacactgagcgtgcagcgtaaagtcggccgcagctggattcctaactcgcgtctgccactgtcagctctgtgcactgaacacgttggccctcaaagctgactttcctcatctgtgaattggggtcgtgtttgtgcctttcctcccaggagttatggggaagacagaatgagagggtgcctggcaggtgccttgtgtaatattcgcacatggggagccacctataaattttagctcctcctggcacttggttgaacagtgagttgattttggtgaagttttggtttctttttctccatggattttgggcgtctgggagaaagtggaggctgtagaacacagcaaagctgggtgaggtggagcaggctccctctcctaagctttgtgtccttggggcaagttcttcaccttctctgatccttgttttccttgtggggaaaatcacacccaccccatggaggtgtcacgagggttcagcttcatcacatctgtcccgtgctgggttttcctgagacgtgttatgtagaggcacaggtacagaagaatcttgcgatatcgctttactaaacataaaactacctaaaaacaccaatttattaagctctagagccattttgcatgtattcacctaaaaatatggtaactgaatttctttcttcccttcataggtgctggagatcagaatttatttacctctgtttatccaacgctctctcagcagcttccaagagaaccaatggaatggagaaggtatgagttgtgtgttttttggctgtatccctctcttcattttttaaaatgaagtacatgtttttaaataagtatatgttgtttagacatttatgtgaacaagtgaagtagcacaagttaaaagcctcagttctaaagaaacagaatgacctcacataatctgtgggtctttgtgggtcttattctttatggaatgccatggttttctttttttttttttttttttttgagacagagtctcgttctgtcgcccaggctggagtgcagtagcgcaatctcggctcactgcaacctccacctcctgggttcaagcaattctcctgcctcagcctcctgagtagctgggattacaggtgtgcgctaccgcacccggctaatttttgtagttttagtagagacaggttttgccatgttggccaggctggtcttgaactcctgacctcaactgacccgccctcctcggcctctcaaggtgctgggattataggcatgagccactgtgcccagactacgatggtttttcttaacgagacattggaaagtagaagcaagacaattattttgagttaaagactcacttttataggaatgatctgtgattcttcatggttgaccagaatgtcttaaaggcacaggcgttttgcaaaggagacacgtgctcacttagactccaccttaaagcggaagaactgggctgtatcagccatcttacaagaccctccctccaccctggctcctgtgcgttttccttaaggacaagaaggtaaacagaaagatggtatttaaaaattaggagcgaggttagatcagccatcaccgttgctctgttgcatgtttacagttagtcgtctggtgacatactcataggaaatcactgactgggaatcctcttcttggaaaacttatttctggtaagagcaggtgttacttgtaaatataaagttgtgtatatgtaaatgtaaatttgtaaatttggattttgtcttgtaacataggtaatctgattttaaccagggtatacagaatttcctgttgttctttgtgtttatgtaagtctgattcttatagcattattcctttctgaccaccagtttgtgccttagtaacatgagggattaaggtggctttctggagttgacttacccaggtgaatatagtctaatttctgtgctgattatagtgtcttacaagatatgcatttagttgctaatatttaatataaagagtgtacagagtgtaagagaaaaattgcttaacatgtgaggaggcccagtgctgtgaaagagagaaaagagtttagcaaatggagtaatctgtaagggcattctgatagataaagggaaaaaaaaagtgtgttcatgaaacaagataattttgagaaaaaaattaaatggagaaactatgtaggcccggcatggtggctcacgcctgtcatccagacactgtaggagggtcaggtgggaggatcgcttgagcctaggagttcaagaccggcctgagcaacatagtgaaacccctgtctctgtaaagaagaaataaaattagctggacatggtggtgcacgcctgtagtcctagccacttgggaggctgaggtgagaggatcacttgagcccaggagttggaggctacagtgagctgagattgcaccactgcactccagcctgggtgacagagcaagaccctggctaaaaaataaataaaaagaaactgtgtagatttaatatttgtattcatctcttcccctttccgaaactccagtaaatggactacataaatactaaacaaataaatggactaaaaaaaatggaccaaacaaatgctaaacaaatcaccctaaagaactaaaaaggcagacgtgcataaagacagagaaaggaggaggcagcggaggccgcaggatatagctgtgtttttgggagaaagagaaacaggtggaggaattgggagagaaagctgaggaagttcaatcccttgtgtcttgtggctccataagaggaggggaatttctgacaagggacaaagtgccagatcttggaaggcccgggtgaaagcagggctggagatgggggttggcagaggtgtggacagggacagttagactcagggtccccactcctgtctgtagtgaagtgattgctgtcattgcccactcccccaacccccccccccacccccgccgcccctcaggaacctggaaagtctttctgtggacagaagagctccagaccctcggatctgaggtgctgcagaaggcaagggagaagggccattctaaaaccagccggcctaggttctgaacagggcacagctccgctccgggaactctgtagccagatccatgcttcctaggcaagagagtagagaacttatctcaggaaaattggatggccccagggaaaagactacgtttttcagaaacaaccttaaaatttgggaaagaaatgtgttaccttagggaagatacgtccacctgaaacctcaggatgtgtctttattggaataagggtcttcgcagatatggttaagataaggacctcactgtgagatcctcttcaattagggtagaccctgaatccaatgacaagtgtccttgtaagaggcagaagagaagacacagacacagggtagaagaccttgtgaagatggaggtagagatgagagtgatgtgttcatgagccgaagaatgctgaggatgccagcagccagcagaagctgggagagaagcaaggaacctcccactgcagccagagggaactaagcccacccataccttgatttcaactttctggcctcatgaaacatgcaagaataagctaatgtcctaagcctccaggtttgtggtagtttgtgacagcaggtctggaaactcatgcaggagggcaggttgaggaggatggagcaggtacttggtgtagtttggatgtgtccccaaacattcttgcattggaaacttaatttctgccctcgtgagtggattaatgttgctgtcacgggagtgggctccttatcacgtgagtggctttcttatcaaagtgagctctctttggctctctggctcttgccctgtcaccatgtgatgccctctgcgggttttgacataccaagaaggccctcaccagatgctggcaccttgatcttggacttcccagcctccagaactgtgagcgcaataaccttctgttgcttataatttacccagcctgtgatattctgttacagcagcagaaaacataccaagacatggatgtgtgtgtgtgttggtgggcggtgaggaggaagagagggagagagagaaaagcttttcagtactctttgtattgaagtacttatctcaggtcagcacagtggctcacacttgtaatcccagcacttgggaggccaaggcgggtagattggagtttaagaccagcctggccaacatggtgaaaccctgtctcttctaaaaatacaaaattagccaggcatggtggcacacgcctgtaatcccaactacccgggaggctgaggcaggagaattgcttgaacctgggaggaggagattgcagtgagccaagattgcaccattacactccagcctgggtgacaagagcaaaactctggctcaaaaaataaaatgaaataaaacaaaaaataattactttgataaaaagtagaaatttaaaattaattgattggatctaggaaatgaaaacaattgaaacaaagtttgccagatgcactaaacagctgtatagctgaaaagcaaattagtgagctggaagaattgagcttagagactcgggagatcattgctaaaagcaggaatgggagagcatggaggaaaagctggccctggaggataaatcacggagctccaggatccacctgaggggcttttcagaaggaaagtggagggaacagaggacaggtgacatttgaagaatggctgtcaagcttctcccagaagggagttgggatactgcaggagcctagtgaatgtcaagcagaatgaagaaaacaaagcaaacagaaaatcatgccagggaatcagagagaaacagaagaagaaccaagtagacagtttctaacagaaccatttacagtgcaacataaaatacatttacgagcagcctccccacagtcctgagggaaagtaccccagaccctagaattctttatcattcacagtgtcatcaagagggaagactctgtcacagcttcccaccctgagggccttgcgtgagccacaggtgctgagagatttttcctctaggcccccggctggccgtgtgggggccaggatggccaggagttctgccccatcacttctgtgtgcagttctgttccatcacttctgtgtacagaaagccattcctgtctaccccagagtcccattcacatatgttcactgcttgtcatgatacggagataggtgcactgaagtgaatacaaatattttcagacatctataagaacagaaaccttgcgaccctctgagtaattaaaggatgtatcccaatacgaaggcagatgaacccagggatccagggtgaaagcaacgtctgccagcaacatgacatgttttgctgaagttaaggtgtcactttttaaaaaaattaaaaatctaaaatttcagatgtgtgtgaaggagaacagagagaaggggagatagactttaactttagtctttgtaataaaaccttaagttacgtactgagaattaaaatgcaaccaacggtagaatagagatagatgataagactttcaaaccagcagagagaaaagatggaaaaagaaaacttgattaatctcccaaaggacaggggaaaactagagccggcaagtagaaaatgtacatatttaagcatcagcatagtcccattcatgatggttggttttaagttattaaacacagcacccttagatcggatgaaaaacaaaatccagctataacattcagaagagacgcagctgctagaagtgagaagtaaaggcacggcacagagatccacgcggtgtggttcactgttagaagcatcgttaggccgtcactgagagccttggatgagatgcagggggcgtgtgggatttcttgatgggttccttcttcttgggttgagaataaagtagaggtttgtcctgctattttatttgtgctctgcaaacaaaaatatgttatattttcgccaaataactttgtttcttggataaaatacaagttgttccaaaaatacgaatgcaaccctaaagctttcgtaattaaaactgcactttggacatttgggacacacttttcttcttttatggtgacataattatagattccgttacactgaaacccaccgtcgagtctgtagtggccctggttaaatgcagtacttggaagaatgtattcctgtgcctgtatccttgaggaaaatgaaagattttgtggaaatggagctttgacctgtacacgtgaactgtgtttaaaataattcctagaatgtttctgagcagaatagcgtagttatgatttggggttaatatatgtgctctgaactcatgcataccattacattatttgttgttctatttcccctcttctgatgaatgctgtttagttgttttctcagtgacttcaaacaattgtttacaggtcctatggccgggctccgaagatgattcacctagagtctaactttgttcaattcaaagaggagctgctgcccaaagaaggaaacaaagctctgctcacgtttcccttcctccatatttactggacagagtgctgtgtgagtaccagcaggggaagaggatgcgcggtgggatggggttggagatgcgtggagagtgctgtgtgagtaccagtgggggaagaggacgcgtggtggggtggagttggagatgcgtggagagtgctgtgtgagtaccagtgggggaagaggacgcgcggtgggatggggttggaaaggtgtgggtctaggctttgttgagccagctgtaatttttcaaatttactttttaacatactctgttataggttgtcccttcattccttggccaagtgcgggacttgctgttgcgtgtttgcgccctggtctggcgtgctgtgctcaccgtggcgccgagcgtggtcgtgttcccatgtctccagtcttgtgagctgtctcactgtgccccacggctgccaggcttagtctaagctgtgtttgatcatgactttcagctttgttttcatgacccctgtgttcccatcgtggctccattgtccttggtcatctgttgtttcttctgcttgtttgtgaccccactgaggctaggaccatgtccttcctccctgttgccgtgcctgggcaggaggcgccccgtgactctccgtggaacgagtgggcctcagccctgtggccgccacagctttcacttgtattttctggttgtgtattcatgaatccagaaagaaccttttcgttcttgacacacttcttctgtcgtgaactaatagaaaattctgtgcggcacttcttcctgtattttgagtcaaataaagcaagatttagcagcatagaaagtacatagattattacacactgtgacattgtagcctagacctgaggcacagaggtagttgttggtgattttaatgagacaggaactgtaagtctgcacctggttttcctcagatttcacctcatgcaccctttctctgctgactttgctccgcctcctttcccacgggctccacacagccagtgaggacacacgtgaggagatttccaccggggaagcctctgccggagactctgtacccaaggttttcaccaggctgcgccgtaggccccctctgcctggcgtgcctgagaaggacactgtccctggcctgctgtgccagctcttctccccataacacctggttgtaatgttcgatttgatcactcctccaggagttgtccggttcctccctggcgtggggctgttgtccccttgcgatcagtaatctaactctggggagccactgtgaggcgatttaagtgtcctgcccctcacccagtggtgattctttcctgagccagagtctttactaagggtgctgacctttccacccatctccgtcagcccgtcccctattctggggagcgcctgcaagggccttctgctcaggcagtggttagtcagtcacctttactgatgctcaggttgtcccagatttggccatcaagagtcacttcagactggcacctgtgttcttttgagcactttctaatcatttgaggcataccaagatgttttaggttctgggagctcgttgcccttgtgctggagtcagccgcgtctccatggagccctggttcctctggcagcaggcgtgcttgctgccatggtggcgttgctgcctctccaccctttacgcagacagagctgatagggatgtgccttagacatcaagaactgggccggtcatggtggctcacgcttgtaatcccagcactttgggaggccaaggcgggtgggtcacaaggtcaggagtttgagaccagcctggccaagatggtgaaaccccgtctctactaaaaatacaaaaattagctgggcgtggtggcacatgcctgtaatcccagctactcggtaggctgaggcaggagaattgcttgaacctgggagtggaggttgcagtgagccgagatcgtgctactgcactctagtctgggagacagagcaagactctgtctcaaaagaaaaaaaagaaatcacgaactgatactgatgcgtccaattttataacttggagggctctttcttgcctctcatttatttctgctctcaccaacatcaacacatctctgtatttgctcagtgctacaacgtgcataagatagtttcagaattggtacacctgcgccacaactaggagcagacctactgagaacagctccaaatttgcaactaaacttttccttttggacagtatgtatcatagtgtttattaacgtctccttcagcttcatccttttcagggtttttgtagttagtcttgcatgtttaattgaggtatttttgttgtgatcaaactaagtttataagttcccatatgcagaactaacatcttgatcacgttgagacatactcaagagcaagggctgcctttccttttgtgcaagtctgcttctgtgttttacactttattttattagagatttttaaaaattctctctctctttttttttttaaagacaaggtcttattctgtcactcaggccagagtgcagtggtgggttcttgggtcactgcaacctcaacctcccgggctcaagtgattgtcctacctcagcctcttgattgagttgagaccacaggcatgcgcccagctaatttttttgtattttctgtagagatagggttttgccatgttggacaggctggtcttgaattcctaggttcaagggatccacctgcctccacctcccaaagttctgggattacaggtgtgagccacggtgccttacagggtctcgctctgtcacccaggctggagtgctggagtgcagtggtgcgatcttggttcactgcaacctccgcccctctaggctgacgccatcctcccacctcagcctcccaagtagctgggaccacgcctgccttttttttttttttttggtgtttttagtagagatgggatcttaccatgttgcccaggctgatctcaaactcctggccccaagtgatcctcctgcctcagtcccctgaagtgctgggactacaggtgtgagccactgcgcccggccgccatagttcaatattgaactatatttatttgcattgctggtataaatcccacttagtcatagtattattttcttaatgtggtattagagtctatcacttgaattttatttaggagtttttgcatctataattcacaagtggttgatcggtaacttttgttttatgctctttttatgaggttttggtattgatgttctacttaattcattaaaataatttggaagtttttacttactttctgtttctgaagtcatttatgtagcactggcgctacctggtctctaaggtttggtggaattttgggaaactagctgggccaggtacttttttgtaactctttgatgaaaattggtctgttttcagccatttgctaattttgataaagtacattttcttggaaattacgtatttcggttaagttgtaaaacttactttcattgaggtatattaagtggtctttctttactttttttttttgcgatggagtttcgctcttcttgcccaggctggagtgcagtggtgcgatcttggctcactgcaacctctgcctcttgggttcaagtggttctcctgcctcagcctcccgagtagctgggattacaggcatgcgccaccacgccctgctaattttgtagtttggagacggggtttctccatgttggtcaggctggtctcaaactcccgacctcaggtgatctgcctgcctcagcctctcaaagttttgggattacaggcgtgagccaccacgcccagcttttttgacttttaaaatgttttgtcagtaattattttcccatcattatttatttattattattattattttttgagacggactctcactctgtcactcaggctgtagtgtagtggcgcattctcgactcactgcaacctctgcctcccaggtccaagtgattcttctgcctcagactcccagtagctggggttacaggcgcctgccaccatgcccggctaatttttgtatttttagtagggatggggtttcaccatgttggccaggctggtctcaaactcctgacatcaggcgatctcccaaagtgctgggattacaggcatgaaccacggcgcccagcccccatcattatttcttattttgtatatttgtgctttctctctttcttccttgattaaattagctagttcgattttttccctccagagaaccaggattttaatgtattcatctgatttatcgttagtctgttttctactcaagtttctactttcatttgtattattttcttctttttgttttctcatggtttactttgttcattttttagttttcgggcgtttgaaatgcatttattttcattcttaaatttttattgatataggtctttaaagttaggaatttttctctggttactactttaaatatatcccattgttttatcattatttttcagaaattctctatttttgatttgtatttcaccctttcattaaatagttgtttaacagaaagctttttagcttacagaaaaaaaaagattaaaaaaattttgtttagaaatttctagctttattgcattgtgttcagaaagtgtttatatttttgctttatgaaacttatttttaaaattttatgaatttgactgttgtgtgacctaataaatgatcagtttttttggacatttcatgtgtgtttgagaatgtattttctgtttccagattgtaatgttaaatatccacaagacctatcttactgcttgtgttgtttaggtcatttatattttgaattttgtccatttgacctatctttaactgacagtggtatggtaaagtcttctgttagtggtgtgtttctgtttctcttgcatctcctgtagtttctgttttgtataggtggttgatgtattatttggtgcttaggtgtttacaacttacagtttttatggagtgaaatatgtcatttacagaatggcttctgggcagtgtatcttgcttagggaggccttgtctgtctgaagagaactgattttctgtattttattttaataattttgtaatttatgtcttatattgggacccgtatagcttcaaattatttatatatattaggagctctgggagttgagggtctaattttactgtctgaatgcatagcaaattggcctaacaccatttcataatagtgtgtcttttctccacttactgggaatgtcacctgtattttaaaccaacatcctgtatgcacaatattctagacactttggttctattgatcattgtctatcctgtgccagaatcagacttttaattattacgcttttttttttttttttttttttgggatggagtcttaccctgttgcccaggctggagtgcagtggcttgatcttggctcactgcaacctttacctcccgggttcaagcgattcttctgtcccagtctcctgagtagctgggactacaggcgcccaccaccacccctggctaatttttgtattattagtggagacggggtttcaccatattggccaggctggtctcaaactcctgacctcgtgatccacccgcctcggcatcccaaagtgctgggattgcaagcgtgagccaccgtgcctggcctattacacttttataatatgtatcaatatctttcttttaaaataaaccttgtggccatctacattttcccttccacatgtcgagtgtccaaatttattttctgaagatggctgtagcagcatacccatcccacatgctcctctctatgtgacagtgactttcccttgttgaaaggctgggcctgtgtttcctccagttgaatctgggtgggcctctgactgtggcagaagcaacactgtgatacttgagaggaagtcctaaaagataacgtgccttctgctggattctctcggggtgcttgttcttagattccagccaccatgctgtggggaagccaagcagccccgtgggaaggccactcgcaggtgttcagcctgccccagctgagtcccactgtgtgttttagctcccagcctcaacacgccactgacaccaggtggagcagagaccttggttcccaccaaatcctctctcagttgtagatccgtgagcaaaagaaagttttacaccactatagcttggagtggcctgttacacagcagtagataactggaatatcagttgaaaaagagaaggctggaggcattttgattgggattgccttgaataagttgttaattcatttgagaagaattttaatcatgagtcttcttgaatcagggaatgtggtatgtatgtttttccattctttatgacttttttctgcccttatttttcgtaaaagttttacatttttattgttagctttagcttttgtggccattttgaatgagacttttttccttaaaattacattctaatagccttttttttttcaaatcttgattatcgtctatttaaaaaaaggagtaagttgataatattgaggattttagatttaaagtaaaactctgttatgttgaatagttgctttaggacttatagagtacatctgtaacagcataattcttccttcaagtaatatgaattatattacttgatgcgtgatataagaactttggatcattgacttctgttttctccctcccagcctttgttattgttgtcatacattttctatacttgttaaaaccccatagtacattgttactattttttgccttaaacagtctgttatgccttggagagattaaaatagaaaatcatgtctttttttttttttttttttttttgagacagagtttcgctcttgtccaggctggagtgcagtggggtgatctcagctcactgcaacctccgcctcccaggttcaatcgatactcctgcctcagcctctgaagtagctgagattacaggcgtctgccaccacgcctggctaattttttatatttttagtagagatggggtttctgccatgttggccaggccattcttgaactcctgaccgcaggtgatctgcccacctgggcctcctaaagtgctgggattacaggtgtgagccactgcacatatttacccacccagtttccatttccattgctgcctgttccttttctttaaaatccctccgcctcccgggttcaagcgattctcctgcctcagcctcctgagtagctgggattacaggtgcacaccaccacacccagctcatttttgtatttttagtagaaacggggtttcaccatgttggtcaggctggtctcgaactcctgaccttgtgatccgcccgcctctgcctcccaaagtgcttggattacaggcgtgagccaccgtgcccagcctttgttgctgtctcttcctttgtgcagatccaggttttcatctggtctggatttcctgctgaccgaaggatttctgtaaccttgcttgtagtgtaggtctgttacggtaagctctttcagcttttgtacattgggaaagtctattttgccttaatttttgaaaaatattttcactcgttagggaattctaggttgacaatttttttttaaagatgtttcacctcttttgggttccattgtttcccatgagaaatctttcattattatttttgttattttgtacaaaagtggctttttttctttgcattttaagattttttctttcttttttctttttttgagagagtctcgcactgttgcccaggctggagtgcagtggagcaatctcggctcactgcaacctccgcctcccgggttcaagcgattctcctgcctcagcctcctgagtagctgggattataggtgcccgccaccatgcccagctaattttttttgtatttttagtagtagagacggggtttaaccgtgttggccaggctagtctcgagctcccgaccttctgattcgcccacctcggcctcccaaagtgctgggattacaggcgtgagccaccgcaccgggccaagattttttttctttatattggtttttaacagtttgattatggtatgctttggtgtagatttcttaatatttcttgtacttggggtttgggggtttattttttttttcttttttgtgggggtggatatgacctttattgagcatatccaccggagaggaaatcatgtttgtacaaaaccagatgtttgttactataccttctgcatcacaattaaaatccgagcagtatttaaaaaacagtcaactcagtcaaaacccactgcttcagaatcaatagcttctttgaagccacagtgacccttaaatatggttaagactcgaatgtagaaatttggttggttggaaagctaattaaacttctaacttgcttaaatagaattacagaaaggtaaattgtgtttttcacagagatgcagtccactggaatcaccaacactggacagctggtagagtatttagagtcctgagaaacaaggaatccaggcatcctttagacagtccgctgttgtcccttcttcccagtcagagatttgtgggtgtgtgcagtgacaccaccaccagcaattgtagccttgacaagagactccagttcttcatctccaggaatagcaagttgcaagtgacaaggggtgacacgctttacctttaagttttttttttttttttggggggaggattgaatttcgctcttgttgcccaggctggagtgcaatggcacgatctcggctcactgcaacctctgcctcccgggttcaagcgattttcctgcttcatcctcccgagtagctgggattataggcagccaccacgcccggttaattttgtatttttagtagagacggggtttctccatgttggtcaggctggtcttgaacttccaacctcaggcgatcctcctgccttagcctcccaaagtgctgggattacaggcataagccaccgcacccggccacctttaagtcttttgatgcatttcctgccagttcaagtccctctgcagcgaggtactccaggatggctgtgttgtacacagcggcagtcgcgcccacacgtccatgactggccgtcctacatttcaggtgtcgatgaatatggcccactgggaactgcaagccggctctgcgagcgggaaaccgcctttgtcttggcctttctggagtcctttcccaccttactgccagccatttcgaattctgctgaagctcaagcaagcaaggcagagaaagggctaatcagacccatggcgagatcccaccacctactccttcggcgcactgtgattcaaactgcttggggtttatagttttgatttaatttggaacatttttattttattttatttttgaggcagggtgttactctgtcacccaggctggagtgcagtggcaccatcttgtctcaccacaacctctgcctcctgggttcaagcgattcttgtgcctcatcttcatgtagcttgaagtataggcgtgtgccaccgtacccggctaatttttgtatttttagtaaaaatggggtttcgccatgttggccaggctggtctcaaactcctggcctcaagtgatcccaaagtgctgggattacaggcatgagccactgcacatggcctgatgtagaacatttttggtcattgtttcctcagattgtttttctgttgcaccctctctgggggagtatgtgtgtgtgtgtgtgtgtgtgtgtgtgtgtgtgcgcgcacacgctacatgaagttccataactcactgataatctgttgatattttttgtagtcctttttccctttttcttggtgtttcatttgtgtaattgctgctgctctgtcttcgtgttaaccttttcttctgcagtgtctaatcggctctcattccacttagcatattttcattttagatttgaggttttcatctctaaaagttccatatgggtctttttcttaattaagtatcttccatgtgtcttcttcacttcagtccactaccttcttcaacatatgaaataactaagtgacagtagttactgtaactcttttaattgctttctgtgtcattactggggctatttctattgattgatttttccttttgagtatagctttatgatttgataggtctggagcagtgatcagtccaggacaaattattccttacagccgaggcaacacagtcttgagttcctctggttttccagactggcctatggggacagccctgttccctgccctgtgtgactgccaagcatgggtgcctctgatcgtgtctgcgggttctgttccagcaatgggtggttcccgcatgtacttactcgtcagttccctgtggaatactcgagggccctgtgccggtctactttactcaccatgtccctctcctctcctaacacagtcctaggaagtctagctgtcttgatctccctggcctgggctctgtgtcctcaactcagggagtctgccagcttcccctctgtcaccccctgccctccccaccctctggtgggcacccagagggcttgctgggcttgtttcccatctctgagtgttgaggggaggaatcattgtcctttgttccttggtgtcctggtcttgaaaaccactgattcatgtttcttggtttttggtgttttgttttggtttttgtttgtttgtttgttgttgtttttgagacagagtcttgctctatcacccaggctggagtgtagtagtgagatctcagctcactacaacctccacctcctggggtcaagcaattctcctgcctcagcctgctaaatagctgggattacaggtgcacgctaccatgcccagctaatttttgcatttttcatagagacggggtttcaccatgttggccaagctggtctcgaactcctgacctcaagtgatctgcccacctcagcctcccaaagtgctgagattacaggtgtgagccaccatgcccaccctgtgtttttttttttttttttttttggttggttcaggcagtggtgtaaatctagtccctgtcacttcatcttggctagaagcagttcactcattgatttctagcttttgatggagtgtaatctattactatcatagtattaataattaatatcattgatgtgcagattgttctgaatttggcttctgtactgatgtactgagaatgtactgattctttgagtactctctgggctcatcccctcctcttgcttcatctcagggctcagccctggctccttccagtgggaaactgtatttagaagtcaggacctggagctaggggagagctttgctggtgagctctcagtgggcatggctagagaacacgtgtgtacacccacacgtgtacgtgcacacatttacatctgtatttcgtgtgtagctgcttgtgtacgtacatacatacatgtacacacgagcccatttcagtccagcactgcaagggtgatcctggtttcctcccttctatgtttgtaactcccttctccacatggaggagccaggcactggttctcctctgtgtttctgatgggagtaatccctctgtgaatgaccatcctcctgtcactgctgctctgctcccagcaggtggatgcccattcccacacttgcctggcagtgtgcctggcacagacttcctcctcacctcacttgatctgcaattaggacaggctcgggacttaaattgaataaaaaggcatccctgtctgggggatgccctttgtgccctgcttggccccttataccacttacacccttatacctctgtgccagccccaaaatccttcatcatctcacttggggcctcacatcttgttctgtacttccctctactgccacctggacaccctcctcactgctgagctctggtacctggggcggcctgctgtgcttgcccaccttgggccctgatgccctgcccctggctgctgctgcctctgtcttggagctggagccttcccctctgactcagctcttgggtcctgcatgtattcctgcccactgctcatgggttttcctgtagtgactttgttttctttctttcttttttttttgttttttttgagatggagtctcactctgttgcccaggatggaatgcagtggcatgatctcggctcactgcaacctccgcctcccaggttcatacaattctcctgcctcagcctcctgggtagctgggactacaggcgcccaccaccacgcatggctatttttctatttttagtagagatgggatttcactatttggccatgctgggactttgttttctttagagacccttagcttcactggctctgctggtcctcttaagagtcacagagtcgtttttaacatgtcgttttgtttgctagctgggatgagtgataggctggatcttgccaaccggtttgccccaggattatgtggaacttctctgtactccctctgtcctgcctcatgctctgtgaggtttcttctggagagttcctgcaaattgactgagcagagctgctctaatgtccccttgggatgtggcagcccctgcccggtgtggacaacttggagccaggactccttctggggtgggggtggggaggagtccagctaaagggctcttggtggccttgtaagaggtggagaggcttccagcagctccttggatggctcacctgtgacgtgtggatggggtcagccgggtgctatgtgtattttcttggcagtcacaggctctgggccctgttggccttttggttttgcttccaggcatggcgtgttggggcttccagcacagaatggttcaccagtgctgtaaaatctatgcttcaagtcccaagaactgccgtgctgtggaaaatgtgcactagataattaagttactgttgggtatttatttgcaggaaattgagtttaccagttggttttaatctcagttttcaaagtaaaagatcttttcagattgtatgatatttgtaatttaaatcaggacatagcagtttttaaaatcaggatacaaatgagaagtactgccttttggaactttctatttagttagttaaaccaaaagagaggctgggtacagaatttaggatttaatattttttttttggagacgcagtctcgctctgtcgcccaggctggagtgcagtggtgcgatcttgactcactacaacctccgcctcccagttcaagcaattcccctgcctcagcctcctgagtagctgggactacaggtgcacaccgccatgcccggctaatctttccatttttagtagagatggggtttcaccatgttgcccaagctggtcttgaactcctgagctcaggcaatccacccaccttagcctcccaaagtgctaggattacaggtgtgagccactgtgcctggccaggatttaagatttaactcactcgtggatactctgattggcttctctctgcctgagtgttactcaagagtgacttgaaagtccggaggaattagggcaggacagtgaggaactagcaaaagaggagaaagcactgatttagatggtagctgtgagttactgtgtccagatattgtcagtgcctaacttggaaatgaattaagtatcttggttttagattttctaaatctaaagggagttggactcttctgagtggatttatggaatagaagcgcagttataagtgataacaggcaaagtgtctgttttcctggttctttatggaagagaaccaagctgaaggccttggcatgtatgtagaaagggccctttctctggcaggctcatgcttgggcctctgcgtgagaagcaggattgatttctgggatggcacggctccctgctgcctgtcgggaagtagagcagccttgcggaagctgcaggtcgccttctttctgaggtctcacagctgtagctgcttgcctctgacacggccttcgcagacttgcggttggggtggttcccaggggtacagagctcagaggctgtggtagaagctgccgggaagcttgcctggggttcctgtgggcagtctgggctgtgccatgacagccagcttgcctcctgagatgaaggcacggcacacagcaggatggcagtcatgtagtgcttgggcccagagctgttggccatagtgggcctgggttttaaagccctgacttgcctaacagacagtattgctgtgggcagctcactcaaccctctgactctcagtctctttatctggatcactgggacgctcacatcccttggggttgtgagaactggggatcatgcatgcctgtgtgcggcactgagacccacagagcacgcccgcaggcttgctaggccgctgggctttttattcaatttaagtcccgagcctgtcctgatgctttaaaacattgcggcctttgcaggctgttattaggcacattttgctgtataaactaaagggcattagttaacctgctttcacagtgacttgtttgtttttaggataccgaagtgtataaagctacagtaaaagatgacctcaccaagtggcagaatgttctgaaggctcatagctctgtggactggttaatagtgatagttgaaaatgatgccaagaaaaaaaacaaaaccaacatccttccccgaacctctattgtggacaaaataagaaatgatttttgtaataaacagagtgacaggtaagtgtatctttaattttacctcatttggttaatacttgacatgatacagattgctggcttcctgggtagtaataaatatttactcagcaatctcgagtgagtgtccatggggtgctgtcaaggagacctggtgcctgtccttgtggagttcctgtttaggcaggcaaagaactcgaagcagtcatcccccgagtgtgctgcctgggaggagcgggtcttgggcccatagtcctgggaggcctcttggtgggtcctttctgaagactgacagcagcagctcctgcagttcttctgtagaacgggtccttaaaggtttttgttttttttttgaaatgacggcacctgtgtttttttctttaccttaacacctgagagttcctaagaacacaagttataaaatgctgacctaaccccttcagaaactgtgaaagggaatcctgaaactttggcagttaatagattgtatgggctttctccgccttgccctgctctctctcctggggtagctcactccctttctcttcagtgatgccattgccagctgagccagccagcacgttaactcctctataaccgatggtctgtatctcgtagcttagcactggaactcacccaaggcctggggattcaggggcgaacatggaccctgccctggtccagcaggtcattatagccatggtcaccatgcttatggtggcgagggttcagatggaggtacatgctcattgtagaattattagaaaaaggtaatgagcaaaaagaaaatggatattaactcttagtattttggtatgtatgttctgagactttttttctttatgcatacataatacgtgtgtgtattttaagttaatataacgttatgtgttgtttatacttgtttttttcactcaatatattgtaaagattttccacaaacaataaatgcatttccagactctcagtgttagtgagtggataatattccatagtattaatgtgccgtaagttatttatacattctgctgctgggcttaggttattgcttacttatcgttataaacaacaatattagaatacttttctagctcaaatgttgtgagcatccttaattatttcaggataccttccctaaaggaaaattgcttggtaacagattttgtgcattttttgggcttttgctagttacgaggctggtagaggcaagggttgacttgtgatcagcagtgtgacttgtgacagcagtagccgttgtggtgtctcgctgaggctgcagccgggagccccttgttccacatgtgcctccagcccctgcagtctgcgcgcctggggggatcacgccgctctccagattggcccaccatccctgacttcattcgttgttttgggctctccttttctgagttaatgatttaggcttgatgtgaacttctgaagtgtagttcttttttacttaaaaaaaattgatgatgatatagaaacaggatctaatagagataggacatttcatgactgtgtatctgattgacctctgaaaacagttactgttttggtggttggcacttgttaagtttccatttccattcacccctgtaggcgcacaggagaattcgcgtctggtcgggaataaatgttggtaattataatccttgagaatgccttaaggataaactacctaactcataggttctagcaagctcctactgtggataaatacaagttagtcctctgggggacctttggagtgagcggctctggtccctttgtctttgagggaagaaagtgtgcagtggggtggattgaatggaattaaagccagccaccaagttataagttttcttcttggttctggttgttcacatggtggaacatgtagagtgtatgctgcttcactgttttgtccactgatttataattccatgaatttagccatgcctccaaaggatatgctggggcacggaaaaaaggaacttagagtcagttcattttgctactttttggtaattcaagtaaaatatttactaaggagaactggtgaagctcatagaatcaatgttttaaaattatttctgagttcagatttattaatcatctttctagattactattaccaaggctaaagaaatttaccatttccagcctatcagataaatacgttgccttgtccaaatctgttgggaactttgtgtaatttcgtgtgtttgacctttttacatcatgggttcagcctctttgtaattaaactgtttgctctatatgttaagccatgttctaagcctttatttgttaattgtttattaaccttccccttcaagagctcacaggctagtgggagggatagaggtccagagaaggggagtgttttcctgtgaggcccacagcctagcagcagtgtgggcagagcagttgggatggtgattgggggaggtttgtgaagatgccacgcctgggtggaaggaatgttctcatgaagagaggagagcgggagaaggtcagcaggcttgagctgggaagcagaggaagtaaagtgagacatcgtggtccttttgtgctgtgctgagaaatctaaatttatcctgtcgatcccaaggaaccaaaatggattttgaaggaggcagggaactgagtgaggcgtgatcacattattttacagaggactcagagctgcgtctttggctcagggctcatgtaaatccctttccccctttccagttgattctatagcaaactctcctttgaatttctgtagaacttactgctcgtgttcatgaccagttcatgatgaagccttttcctaacctggtttcttaccgcctgcctcatgtttttgactgtttatagacggaagaagctagatgcggtggcttatgcctataatcccagcactttgagaggccgaggcaggaggattgtttgagcccaggagttcgagaccagcctgggcaacatagcaagacctcacctttacaaaaaaatacaaaaattaaccaggcatggtggtgcgtgcctgtgatcccagctactggggaggatcactggagcctgggaggtggaggttgcagtgagccaagattgtgccactgcactccagcctgggccacagagcaaaactctgtctcaaaaaaaaaaaaaaaaggaggaggaaggaagaaaattgccgctcaggacaatggcagctgctgagtcgtggtgctgtgcatggagggtctttcccagatagtctgttcatgtctttgcaggtgtgttgtgctctccgaccccttgaaggactcttctcgaactcaggaatcctggaatgccttcctgaccaaactcaggacattgcttcttatgtcttttaccaaaaacctaggcaagtttgaggatgacatgagaaccttgagggagaagaggactgagccaggctggagcttttgtgaatatttcatggttcaggtacttgactcattacagaactagacagttccttctctccttccctcctttgttccctccctctctcctcctttctttctaagtaaggcacctctcgtggtaatctcattggcagagtttttaaaaacaaaaaacctggaatatctttaggactagaaaggaagtgtatggaagcagatggggcatgaaaaggacacacacactgccccggggagcctctgggggcaaaagctggagcagtttcagtgacagaataaataaggatagagtcgaggtttaacccatggaataaaattaatatccatgagtctgtatcgatagaaatcatcagttaaataaataaatggaggagaagggtcaactcttccatacagaagaattccacttaaacgcagaaggaaagaaaaacagaaaatcacttttaagccagtgctccagcaagaactgttggaggcaggattactgatgggtgtccggggtggtgggcaaaggcctgagaagaggtgggcttgcacagtctcacggtggccccccaagatgtctgtcagctactgagggagcagtagccactccacagtggggaaaccaggtacataccacctgaatgaaatgataaggccgcttctgcccatgagaagctgtgtccacctcatgaaatccttggtaagatgttctgagaaatacttagcgtcttttctctgtaaaaaatgatcatctcacggcagtcacggaacatatcaaatgaacccacgtaaagggacattagacaacatagctctcttcaagggtgccacggcagtgaaagacagactgtgaagctgacagactgcaggggctgaaggaagcaacagctccggcctggtttgggggtcgagggtggggtcttagagcagaaacaactacatcagtggaaaaaccactgaaattccaatgagggctatttagttaatagtattatacttaggttaattttctggttgtgacaattgtaccacggtcatataagatggcaatgtttaggaagctgagtaagggctatatggaaactagataatttttttttttgcaatatttctgtaagtctaagattagttcagaatttaaaatgagtaaggaaggaaattctgacacacactacagcatggatgggcctagaggacatgatgccgagtgaaataaggcacatagggacagatgctgtgtctgcttatgtgaggtccctcgagtgctcaggttcagagacagaaggtggaatgggggctgccaggggctggcagagggagaatgggaatgagtgtttaataaaggacagaggttccgtttgggaagatgagaaagtttgggatattggttgcacaatagtgtgagtgcatttaacactactgagctgtagtcttctctctctctctctctttttttttttatgatggagtcttgctctgtcaccaagggctggcgtgcagtggtgcgatctcggctcactgcaacctccatctcccaggtttaagcgattctcctgcctcagtcccgagtagctgggattacaggtctgcgccaccacgcccagctaatttttgtatttttagtagagatggggttttgccatattgcccaggctggtctcaaactcctggcctcaagtgatcctcgcaaagtgctggaattacaagcctgagccactgcacccggcctgagctgtacttttaaaaatggttaagatggtcagttttatattacatacatttcaatcaaaatttaaaagaaaaagatgagtttattagagtgctgagtcttgtaaatacttcacaaataaaatgaagttcaacataacttagcagtttctcttgcaaaacacagcccaccactgttttcacgggaaacaggatacaaaggagagctctcagttctcacctagtgagtgggacctgggtgggcccttaggggtctgggaataatgtccacaaatacatggggtggaactggattccaaagacctgaccatgtcaggggaggtttatgtgcgtgcacatcctcctggtctttactttttaatgtgcagtaatggagatcagaaggcaatcacctgttgccctctcttttcattttctcattcaacaaaggttactgagcacggacaggtgccaggccctccttgatgctgggacgccgtcagtgtacagttttttgtgagcttgtgtgacagtggaggagatacaggaaaggaagtgacgcatatgctagggcgagagagaggcacaaggcagagatggtgtggggtgctgtgcgggtcaggaggaggaaaggcctgactgggctggggacttagccagagctgaaggagtttggagagcaagccatgtgggtgtatagaggaagaggaggtgttccaggccatggagtggggcagcgcacaggtcccgaggcagctccctgccacgcacacgtgagcagcggtgaggaggccttggtggtggagctgagtgaggccagagggctggtgctgggaaggggtgggggtgggggacatagattttgcagggcctggggatgtctcgaaaggatttaggagtctcttgaatgtgatgagcagtcgctgactgaaatggggaagaccgtgggtggagcactttgtgggaaaggttggggttcaggtttccatgtgtaagcctgagctgtctgttaggcatccacacaagcgtgctgtgcctgccattggagccagagtcaggtctgagctggagtcctgaatgtgtggtggtcatgctgtgtagatgggctccgtcatggagagggaatagtgagtgtagacagggaagtccaagggcggagccctgcggcctccagcagagagcctcggggagcgagaggaaccagccgtctgaccagagggagccacagtgaggggcgaggggagcaggtggccaggtcctggacagcaggaaacatcccaaggacaggggggtgaccagttatatctggtgctgccgataggtcggggagggttcagaaattaccttagcttttcctagcttcttgtgcatgcgtgaatgttgacatatgcggtcgtcacattggttgttacttagcggagcgtagacattattcatagtgctgcgtgcctttctctgtcgtttaatggctacatactgtttcttctatacattgatttatgtttttgtttttttaaaaaacgtatcttgggcgaataggaggagcttgcctttgttttcgagatgctgcagcagttcgaggacgccctggtgcagtacgacgaactggacgccctcttctctcagtatgtggtcaacttcggggccgggggtgagtagtggcacttcagtaacgcatgcttttcttagtgtggctttctccaacttcagataggcttgaagcagccatttatttacctcaggagtacgcatgttttgttgttgtctttatacacattatatcggatatattctcgtgattcctagaggaaatgaaatgagaattaagaattagtcattttcacttttagaagaatcttaagtaacaaaaataataataatttaaaaaaactgttttccaggtataaaatgtcctttccacaactcagtggcctgctggtgatgcttcgattctgtccctcgttagaatcagagtggacgtccctttgccttccatccaggggttatctttggaatgctcgagtgctcattgctgtgaacttataaaatgcccttgggtgttcatctttcttttgcacttttaaataatatcttaagctcctttacaattaaagaattagcacagtgaaaccatacacagagagaaacattggttattgtcctcagtgtttttcgctgatacttattttgatgaaagtgataccacgttatatagctgtttctctgtcgctcctttttgttactcacagcccatcctgggcatctctccaggttagcaggtggggtttggagttgtttttgttacaattggtattcctggcttgattccattacctggtgttggacattgggttcttttatgcttcttgccaccacaagcagtgctgtagtgggcatctctgccaggtgttctttttgagaacccttgtcaccatgtgtgaaggaaggagtaattttgaggagccctggtgtcagcaggagaacctggagggagatgaagtgtggggacggtcagttctagctgtgagcactgtcctcactctggaactcatcagtggcgccgatggatactggctcatagtgcttctgaagatcaggtctggatatctcactctcctgagatgccagtatagacacagaaccaaagcaaagtgtttactaagtaaaaaaataaaataaaaaaacacttctatttcttatattttatgtgtcttttttttttttttttttgaaatggagtcttgcactgttgcccaggctggagtgcagtggcacaatctcggctcactgcaagctttgcctcccgggttcatgccattcatgccattctcctgcctcagcagtgggactgggactacaggcgcctgccaccacgcctggctaatgttttgtatttttagtagagacgggttttcaccatgttagccaggatggtctcgatctcctgacctcgtgatccgcctcagcctcccaaagtgctgggattgcaggtgtgagccaccatgcccggccttatgtgtccatattatacaaacatatctatttatttatttttgagacagtgtctcactctgtcccccaggctggagggcagtggtgtgatcttggcccactgcaacctctgcctccagggttcaagcgattttcgtgcctaagcctcctgagtagctgggattacaggtgcatgccaccatacctggctaatttctatatttttagtagaaacggggtttcaccatgttggccaggctggtctcgaactcctggccccaagtgatcctcttgcctcggcttcccaaagtgctgggattatagttgtgagccaccatgcccagcctatacatacatacatacacacacacacacacacacacacacacacactttttttttgagacggagtcttgctttgttgccaggctggagtgcagtggtgtgatcttggctcactgcaaccttctcctcctgatttcaagcgattctcttgcctcagcctcccaaatagctgggactacaggtgcgcaccaccacgcccagctaatttatttatttattttaattttaatttaatttaattttattttattttttgagacggagtcttgctctgtagcccaggctggagtgcagtggcgccatctcggctcactgcaacctccgcctcccgggttcacgccattctcctgcctcagcctcctgagtagctgcgactacaggtgcccgccaccaagcccggctaatttttttttgtatttttagtagagacggggtttcaccgtgttagccaggatggtctcgatctcctcgtgatctgcccacctcagcctcccaaagtgctgggattacaggcgtgagccactgcgcctggccaatttttttatttttagtagagttggggtttcaccttgttggccaggctggtctcgatctcttaacctcgtgattcgcccgcctcagcctcccaaagtgctgggattacaggcgtgagccaccgcacctggcctgtattttttaaatatcttacatttttttaaaaaatagatttatttagcaaaaaacgtttgaatttaataaagaaatggcaataactggtgcatacattagttgaaaatattaaaatatttacactgagcaccaaatagaataattctcagtcttttcatggagaactcctttgaaagaatgcctagaacttaatctgtttatttaggtttttaatcgagaaatctaaaactgccaatcacagtttctaattaccatgagatgaccaggttaacaaccttgaggtcatatcataggagctttaaaagctgcgtttaacctatacattctaactgagggcatttgttagcctcaggcaggctggtaatcacaggtccatgtgcttgtgatgccatatacacaacattgagtaaataagtgttatttataaggtaaagaccatatggtccctggcagcagaataggtgctgggcagcgtcagggaccaggcacctgaatggatgtcagtgcatgtgagaaggagccttcaaggctgaaatatcttacatatttcttatatttgacataatttatttggttttttctctcagttttaaaatttggggcaatttaaaatccaaaagtaagcctggaccaaattttgccactgaataagatggttcgtttttgttctttcattcaacaaatacttactgagggaccaccatgtgccaggcactgttctaaatacagggaggaataaagcagaatccctttttttatgatgcttacatgaaggggaaacaggcacagaaaagtaaatctatcacttgctgtccataatagtaagtttgggccgtagaaaggggctcaggtgagagatggggcagtatgtgccattggagcttagatagggcactggagtggcctccctgtgggggcggcactggcacagaggcctgactgaaatgtgggagtgccccgtgagaatcctgtgggaggggagcctagccaagggaactgctggtacagggctgggctggtacagggctgggtccactccacactgctgggtgctccaatagccctgaggatgctggtgcaggggctgggccagcgggtccactccacactgctgggtgctccaatagccctgaggatgctggtgcaggggctgggctggcaggtccacaccacaccactatgcgctccccgggtctgaggagaagctcacgtcagtgaagggagcgtttaaccatgccaggatgccacgtaggaatgaactggttatgacacctctctgttgaagtgagaaaaatagattcaaagatttttttcaataatgattgatggacttgttattatacattgttatgcttattttaagatcatatttgagtcttagggatgtaagtaaacctctgggagccttgctgaaattttcgacaagcagtaattctttttccttctatgtgctgctaccaagtcctccctgtcccttcctccaggagcttgactcagggacgtgacgtggttgagttagggaaataaggaaggaatatgtaatctaaggaagaccaaaaaacaccaggatggtcagagcaggctgcactccagcccacaggtaaagataaggaagcccagccccgctgcagcctaagactagagccctccctcggcctgagacagagcctgagctcccctaaccatgtagcctgtctgtctctgggtgacttcccaacctgttcagctcccgcccatgactttctgggcatggtagggtggtgtgccttgttgcctgggtcacgttaccctcagctcggctgtcagtgctgggagccgaatgcatcactagaccacagggggtgggccagtgttcatagaaaaactggttatgaagctgcctgtttgcccaccatcctcagcctgagcaggaagctcaggaaggtgaagtacctgcaatcagcacctttcatgatgtgtgtttgtttagatggtgccaactggctgacttttttctgccagccagtgaagagctggaacggattgatcctccgaaaacccatagatatggagaagcgggaatcgatccagaggcgagaagccaccctgttagatctgcgcagttacctgttctctcgccagtgcaccttgctgctcttcctgcagaggccgtgggaggtggcccagcgcgccctagagctgctgcacaactgcgtgcaggaactgaagctcttagaagtgagtcggctgttttcccaatttacccgtttcttgattgttccagcagaaatctctgaaccttgagatcccaggcattgaactgtttgtgcttaagaaagggttttcttttctgaatgcctttaattttcagtatattgtttgcttagttactttttacgttgataaattgctcaaaaatagaactctgttctcaacatgctggagtttgtgccggtccagagcaagcctcttagatgagcttctcagtgaagctcactggctgactgcggcctgtgctgctgcgtgagctgtctccacggggaagagtcactcacctgagggacacgcagagctagattttgcatgtagacatttattttatttcagacacttatgtcatgtagacatttatttatttgtcttttcagataaatagttttgcacatggccatgcaggtagcaatgtgagtgacacacagcaggctgtgccccattgattagtagtacggagcttcatggaagatatgtcataaatatgtgtgtgtgtgtgtgtgtgtgtgtgtgtgtgtgtgagtgtgagaatgtagttagtaaaacatttgcccttagagataaattcacccaagcactgaactcttactgtccatagaaccacggacattgtagtgagatgaaaggactgtagagaccgtatctagtctggtgattcttgtttcagggtcctctttacccaaaacaattcacacacacacaaaatgatacttacgacctgaggatttgtgtacatccctgccacccatcccctggttaagatctcctgagtgagtggtctctgatgctgttttgtaaacaagaaaacggagtctggaagtgattaggtctgaagagtataagccattgatggggacggtgtttcataatataggaacttatttttgtgtgcttggtttaaaataattttaagagatttaaactttaattaatgaagagaaatatattttagttaatttcaaaaggagaagttcttatttcagagctaagctcattagtacctagcccaagtcacaaactcagaaacttaagaatttttatcaaatgatttttcttcacctaatgaagcaaatgaggaaaagaaacattttccacctcgaaatgaccctctgggctgcctgtaatcacctggatttagagactctgcctgggttgctcagccctaactgcaggttggggacggggctgtgagggaaccattcactcctagagccgggctctctgttcatgtgtacctagggatttcacctgatgttgagatttttgtcttactagccgggaggggggaaaattgaagtattcaagtccaaatgattcagacatgatgtcttctgagtgagacgaccccaggaggctgattggagagggctgttagttttgttattaccttgtggctggaaggagaaatgtgtaagtaatagagggtgtgggctctggagttcccttgtagcgtcggggttcacaggagccatacggggtctgttggctcctctaggtgctcgtctgcagggccgggaagtcacaggtattttcaaggctttgtatcgtgtgaggagcctcttatccgtggtgtattttccgagccctttgctttgctgaatgaagttgttgtccccttggcctttccttgagtggaagctgccccattgcttttagtcatagctattgcacctctttgcacggttgagttctgcatctccagtgagaggaggtggccaaaggtgaatgctggatttgaggcaaggacgtgtcacccactgatgactttctcacagtctgtcagtctctttccttctaagaacccgcttcctgtttcgtcatcttctgatgcacacagctggctgcgcctccttacatgcgctgtgcctgtcggcttcccaggccagagaggacagcctcccttgtcgcttgtgttgaagcccacacaatcctctttgcacactttgcacctgtgtttgatcaacactgagattcacactgtttacttagagggcttcgctggtaacttcacgtcagaagtgtttctctttctctccttttttctaaatttttaaattttttggtagagatgagtgtctcactgtgtcgcccaggctggtctggaacttccgggctcaagtgatcttccctgctcccctcccaaagtgctgggattacaggtctgagctgcccgtggctgtgtttttctctcttgtgcagtagtttttactccagtctagttgttaggattttttggtgagagtcaggttttagggctacagttgagcagaggccagggggtaggtgtgccactgtcagttgcagatcccactgtcccactttcgagtgggtggcttataaaacatgtcctgctaacatcctggttgctttaccagttgatttgaagtacctcatttatttaaagagaataggaggcaacgaagtggccagctgtgatggaaactagccctgctctgtagtagggcttgatccacactccaggggcgacgggggctgaggaggggagcaagacggccggatagaggcctctgccctgtgggtgctgcttactagccttgcgcactcccttaatggaaaatgtgttaagaatggagattgtgcctaccttgcacagctggctgctggggtgagcggtaacacccgtgaagtgaggccagttctgcgtgagttcaggatcctccttgacagagtatttcctttttttttctgtaacaatttctaattttccctccatttacaaaagttgaatgttttctttatgtaaatttggaaaataacagacaaatatacgaagaaaatgtcgttgcttttgctagcaggaagaggttccctttttttgtccatggccttcttatgtatagatgaactgcagttatttccttgctcctatttggacatttgaattcttcaaaattctttgcaattgcagcagtttgtatccttatacatacatctttgtgtgtaaattcatacaagtagaattggaaggtcgaagatagacatgtttttaaagctatatgttgttaatttgtcctccagaaaggtcttcccattttcagtcatgctagtgatgcctgttttcctgcacctttggtaagaaaaaagtatgatacttatatattttgtcgccaaattagaagaacggggaagatactttcttgaaggccataatgtgtttgttacaatgattgcccaagtgattttttgggggggtttggaatgtgtttcattcagcgtttgaccttttatcaccttagctgctggttatgtaacagaccgtgtgggcctagcagggtcaggactcctccagaccccaggggagtcaccagcctagcctgtggcacggaggaaccgtgcatgggacgccgtcggagttagctggccggtttgtgaacagaggctgtgtgtggccaacctgcaggttgaaccagaggaagaagaaggtttacagtcaaagctggccagctgggatcggtattctgaggtgcaggcctggcagaggacaaaggcagagatgtagtgtgggaatgtagattgtgtttgctgagggcttacagtgtacccgacaccctgctgggtgggtgctctcatgtgtaggtggaggatcttgtgcacccatgagccatgagggggaggagctggattgaaggaggaggggtggttgtgagagctgttgctgaagaagaactgatggctcactggacaaaaggaaagagaggactgtcaagaatcattcaagaaacgtttccttgcctgccaggcactgtgggagacagggatgggggtgcacataaatgaagaggaaagggccccacctaccggcatgaggtgccacgggtcatcagcacagtgtccaagtagtgacgaagtgttgtctgcacacaggggactgtaagggagggaaaggcagctttgccggatgcctcaggtcagcttggtaaacatttgcaggtgcctgataggtgctagggaagctttctagaggaggccctatgtgaactccattaaaaagattcattcaggctgggcacagtggctcaagcctgtaatcctggcactttgggaggtcgaggtgggcggatcatgaggtcaggagttccagaccagcctggccaatatggtgaaaccctgtctctactaaaaatacaaaaattagctgggcgtgatggcaggcgcctgtaatcccagctactcgggaggctggggcgggagaattgcttgaacctgggaggcagaggttgcagtgagccgagatcatgccactgcactccaactgggcaaaagagtgagactccgtctcaaaaaaaaaaaaaaaaggactcattcacttatcagatcttcattgagcttctgttttgtgccaaccattgtggtaggcactgtattttcagcagagagtgaaatagaattcctggccttatgaagcttacgtgctaaggaatgagtagggggagtaagaactcaccaggtagatgtgactgctggtggcgcgggagagtgcgtttcaggtggagaagatggtgttattgaaggtgctctggaggagcctggtcttgctagaacttcaggggtgaggcaggctttgggggcaatgaagggaaattctgaagttctttgtgtgtcacgttgaagcttgccctttgttctgtagccagtagggagccatgaaaggttaggacctagtgaggcagagggcagagagaggcagagagaggtgaagagtttggaaacttctgccatagtccaagggaaaagacggagttccaaaaggcagttgaggtagattttattttttattattattatttgaaacactctgttgcccaggctggagtacagtggtgtgatcttggctcattgtagcctccgcctccagggttcaggcaattctcctgcctcagccagtcaagtagccaggattacaggtgcgcaccaccatgcccggctaatttttgtattttttggcagagatggggtttcactatgttgcccaggctggtcttgaactcctgagcgcaagtgatctaccctcctcagcctcccgaagtgccaggattacaggcgtgagctattgcacccagccggcagattttaaataaataggttcaagaaaaatttagtgaattgatggttctgggtccactggatatccatatataaaaacaaatcttgatctcaccccataaacaaaattaattccaggtggagttttgatctaaacatgaaaaataaaataagaaaactcttgaagataacttgggaaaatgtctttgggaccttaaggttggcaaatattccttaaataggacatgaaacctttatggttatgcaccagccgtgaaggaagagggtcctgcattagactacgtaaacatcagtgcttctcttcactgaaaggtactctgaagggagtgaaaaggccctccgcagcttggaagagtacaaccagtatatatagacaagaaagggcccttactccagggcgtactgtgaagaactcacatacatcaatgcagaaagactgacaaaccagtagaaaaacaggcaagagaggaaatccaaatggccgataaacatgaaaaggggctcagtctcatgaatcatagcaaaatgcaaactgaagccattattaatgaagtaccagcacacaccaccagaatggccaggatggaaaggctttcctcgggtatcagtgggagggtggagatgctggcgctcattcactgatggtagtgtgcatcactgggaccactttggaaggctgtttgcgatatctaatgggtatcgccattacaacacatgccccgtgacccagcacatccacccctggtgtgtacagatacatgcacacacacatgcatcagaaggcaagtacacagagatacctgtggcacccgtgagtcattggagctgcaaacggggaagaactcaaatgttcatcttgtccaagggatgacaacgttgcaccgtggccctgtagtgtgctagggtacagtgatgaacgtgaatgggtcgtagtggatgactctaaccaacctgaagttgagctaaagaagttagacacaagagaaggcatactttttttttttttctgagatggagtcttgctctgtttcccaggctggagtgcagtggcgtgatcttggctcactgcaacctctgcctcccgggttgaagcgataagagagggcatactttttgattccttgtgtctgaagttcacggtgaagctacaccagtctgctgtgagctctctggcaggtggaggggctggtgactggcagggagttccagcgggagctgccttcacgggaggcatagcaggcgttcacctaggactcatgtaccttccagtgtgtgggttgcactcaagtggtaggggtatcaaaagagagaagaacaagaatgcctttaattttatacttggaagtggcaagatggcacttgccattgctaatacagcaatcaggagaggaggagggactttaaggaaaattaatataaattaagaatttgtttaagaagtctgttattcacaaaagatgatatccagatggccaagaggtatctgatggcccattagggaaatgtgagttttctggagacggtgaggccaccacccggttccagagtgaggtgaccaagctgcacgctctgccattcagtctcaggctctcagggcagagcggaggcttggtctttgttgtgttgggtgctgtggcatgctgggtggcagatgccaccatagaggcatggccttcgtgctgttggctgaggtgcccattttctgtgtcggccaccatttaggagcaaggggctgacatttgtttggacgactcaaagccatgaagccatggctgcagaacaattgctcttttccagagtttgtgagactcttgttttttattctcaagctgcactctaatgggtaaaataagccagggtggctctggcactctctgtccccttcccccgagctcttgcgtctctgctgcagggatgctggtgggagaagagtgctggcactgcctgtgttctgctgtgagtagcctggcgcacttgggcctgggggcgtcttcggaccctgagaagtcatccctccgttgaggcaggggtaacattgcaaatagctttacccatagtagccaaacactggaaacaacccagacacttgataggagtggataaataaactgtggccaacttgtagaaaggtttaataagcagcagtgaaaaagaacaggccgacagactcagcaaggttgaatcttaaagatactgtgtggaattaaagaagccccatgcacaaaggaggacatgctgtgtgatttcattatatgaagttcacaaatcagccagaaggaattgatggtggccgaagtcaggagccgggtgcctctttggggtggatcttgaccgggaaaagggacttgagagaaccttctaggataattttatttcttgattaggtggtggttacatttgtaaaaatcatcgacctctaaatttagggtttgtgcccttcacataccttgttgtatgcattttgccacttgttttttcaaagcaatgaaaaagtatcactgcaattaggttttaaataaatttgtttcgttaacatgtctggaagtcttagatgtcttactgtggaaggtctcgctgctgtggagcccacctctttcaggccctctaaagtatagagaagaagcagagtgctcggccccctttggggtgttacctggggtttgggtgggagctaagagacacacacagtaagtagtaacatacgaggcaggcggctctgcaaggcggcactgcagaaagggttgtgtatgccacatcatatgccaaattcacatgcatgtctttttttccccataaaaactgaaattttaaaatgatctgtgataggaaatacagggagctgtgattctcctgggaaataaaggcacttagagcatggagccggtgagaactcgcagcggagaccagagcaggcccgggggaggctttgcactttgggaggtgtgagttccagagggaggggtggccgagctcaccttcaggtttctgttattcagtgaaagcctgcccttgttccttggcgtgggtgtgtgcaggacctgcctgctctctcccacctccttcaggatggaagttgaaggtgaagtctcagcagccagtggccaatgggtgccactggattttgttgtttgtaccccagaaaagctgccgctacctgatgctgctacttttttaatactgtcgttcaagcttaccaaagcgggacttgctctttgcaggaaaaaaatatacaaagaactattctataatcatgccatgcagtaattaatgccactgttggcattttggtggtatcatttgggagcctttctggggtgcacctgtgctgtcaggtggcgcctcagctctcggctgctgctgttccctgcggactcagttcagcgcctggtcgcggagcggccctcgtgccctggctgctcttgcttctgcatccagcgtcctctgccgcggctccgctgctgtggctcctgggctttatctcccttctctgtggatgcatctttaccaaaagcactgtacgtcttcctgctttgtaagagtctctcgtggtctcctaggaggtgtttgtttgtttgtttgttttgtgtttcgctattgttgcccaggctggagtgcaatggcatgatcttggctcaccgcaacctccgcctcccgggttcaaatgattctcctgtctaagcctctcgagtagctgggattacaggtgcatgccaccacacccggctaatttttgtatttttagtagagatggggtttcatcatattggtcaggctggtctcaaactcctgacctcaggtgatctgcccacctcggcctcccaacgtgctgagattacaggcgtgagccaccgcgcccggcctctcctaggaggtctttctgtcaccagtgtgtgcccaggggaggtgcctgtttacagaagcttttgcgcagtgggtactgatggtggtagcgtcttgggagatgaaaagtatcccagatctcctggcacctgggaaccaggcgggcctgcaaggtgcggtcagcccgctccaggcctgctgtggtttgactgatgaggacgctcatcaatcggagggacacgctctgtccaggatctcagagctgcttcctgctgccccgcttttctgtgccttccctcagtgtggtatgtttgggtgagagagttgtgcagctttatgaaagtggcttccgattatgcagtttttgacctacactgatttttttttcccaaaaggtttaagtagcttatcttatttttcagaagttgggctttttagcttttatgggaacatttgatggcactctttggttcttccttgttggttccaggtcctttatttgtgctcagggtgccttgcaagagttcttatgggagtcagtttccccggcattggcagctcatcacctgttgactggtgatttgaagagcacaggtgaacacatttcaccaaaactaggacacatcatgaagtcagtgccaccagagaaaaagtcagcattgccacttaaaagtgtaagatgccacttgattaagagaaacattcctatttcagaagtgctaaaatgtgggggaaaactgcatcttatacagcaggcgattttgcttttctgatagtgttttcttttttttgttttttaagtggaaaggctcaagtaaatacagaagcagagaggataacataattcccatgtaggacccatgaacagttacagtaggcgcggtacctggccagcctctacttcatctgcatcctcgttcacttgccctgggacgtttttcaaatacagacattgggtttcacctgtaaatactgcagtgtatagggagcaatagggagctctttttcccaaacataaatatactgtctttatcacgcctgaagagtgaactgtaattcctcgtgtgatatttctactcggtattcagtttctgctgttgaacgtgatctttcttaaatgtgaccaagcagtcatttgaggtcttagttttccctcccctcttgacactaatctgtggccaatcctcactcttggagtaaatgatcatatttggtctttttctaggtttttcctttttttaaaaaaaaattctttttctatatatatttttcagatctagacctgcagaggctttttcttaataaggttttcaaaaatacaataattgaaagttatacataaaacctgataacacatttgaatataggtcacactgcttctctcttcccatgtgaatgtaggtgattagtgttctttgcccctttctctctcctgtagctctgcatatcacagaactgttagatgaggtggctgcttgaaggatggagggttttgcacgttcaagctagagcatgtgggtttgttcaagctagagctgtcccggagcacccctcacacgttcgcatttgcacccccacaggtctctgtcccacctggtgctctggactgctgggtgtttctgagctgtctggaggtgttgcagaggatagaaggctgctgtgaccgggcacagatcgactcaaacattgcccacactgtggggctatggagctatgccacagaaaaggtgcctacctgcccaagtgtggaatgctcacgttgtctctgcggccatgcctgggtggcggaggaagtctgctgtttggaggagaggtgttgctcatttagatcacgatgcatccactttagtggccctagaaggtgtctgggtgcagccaaagaagtcatagttccctaccacatgtcgatgtagtcagcagacagcaagcacttgctgtgctcctgtgaaattgactctgtaccctgagtcgggggacacgagggtggtgctgaaatgtcagctcaccaggcagagctgtgctggtgtgtgcagcaggtaggctgggcttatgcaggtgcaggcgtagcctggggaactcagggaggtgaaggacagaagcggaggattcccaccctccaagcctcactgggagctgttgtgtaggatgtatttttgtatccagatttgagtcattgggtaggaaagctaaatttcttctagaatttagctggatttgaatttttatatttaaattcttgaattccctgctgactcttacggcaaattaattgaaattgtggatttatcttaacagttaaagtccttgggctatctatgtggacttgtgtcagagaaaggacctaactcagaagatctcaacaggacagttgaccttttggcaggtttgggagctgagcgaccagaaacaggtacttttttgtatatacctgtgtgagtggtgaggtggacagtaatgaaaatgtcctttgcaagttggcacatttaaccgaagttctaagagtaatcatattactcaccatttggaaaattatacccattgttagctgactggattaaagcacatgatagtttaccttttaacagcataatgcaatattagaaatagttgaagaaattggaaggagtttcagaaatgtagctgagtttctcctgggcttaagggactttatagctcatgttcaaatgcaccactgtctctctgaattacagatgatctgtttttctaacaatacgacctgacgattttttttttttttaagagacagggtctcactctgttgcccagactggagtgtagtggcacaatcttggctcactgcagcctcgacctcctgggctcaagggatcctcttgcctcaccctcccaggtagctgggactacaggtgtgtgctaccatacttggctaattttttaattttttgtagagatggagtctcgctgtattgcccaggctggtctcaaactcctggcctaaagtgatcctcctgccctggcctcccagcaaattttttaaaataaattggctgggcacggtggctcccacctgtaatcccagcactttgggaggccgaggtgggcggatcacctgaggtcaggaattcgagaccagcctgaccaacatggagaaaccccatctctactaaaaatacaaaattagccgggtgtggtggtgcatgcctgtaatcccagctattcgggaggctgaggcaggagaatcgcttgaacctgggaggtggaggttgtggtgaacaaagattgctccattgcactccagcctgggcaacaagagcaaaactctgtcaaaaaaaaaaaaaaattctcctggataataaggctctttgaaaggaggattactcattgttttacgtaggaatatatgatgagtattatttagcaagactgttgctaaagaatatctgatgagctgaaaacattcttagtaaattgaataaatgtttaagggaaaaaatacgtagtatttatatttcattgtttcaacttgagaccatttcagatcacttcggaagtaatttaattcatcggagtatttgtaatatatgtttctaaaaaagtttagttctaaagatcagagaaaaagcatgacacaaagcgttttgactattttatgaatatgtgaattgaaagagaatgtacataatcatgtagtttccgttggcattggccggtttgtaatttcacaagagtcagatgaggtcatctacctgcagtatgtgaaggtgaatgtaaagtcatgtgactggacatgatgaagatgaagagggactctcgtttctttctgtttaagccaacacagctcagagtccttataagaaactgaaagaagcattatcgtcagtggaagcttttgaaaaacactacttagtaagtattaacaagtgttcaatgtctgttctgtgaatacctgtctctagaaggctttgctacatggcctgttgagttgggaaggaactggtgtggggggccccttcttgttggttttttttagtttctttggtacctggggagttgtggacaaaacatggagtagttcatcaaatgtgtattagtgcccatggtaccatgctaggcatggaatcatctttgaatatttaccgttttgttcaaattgggtttgctcacacagaaattataagagaggctagtgaatacttttctttgtaaaaaggagtaatttggacttgggcagagctattgtatttgattttgaaagacttaaattagcaaaactttaaaaaacggcgtaggcagaagtgtggtgggtcagcgtcattcccgggtcatgggcaacttgagcgtttggtctgcccgtaatggctgtacctcttatacacacaagtatgaaaaatacccagcatgtcacccacgtgcagaaagtccttggaaaagttagatgttttggatgagtttgtgggtttcttttattattatgcttcataatttatacacaggttaccaattttgcttatatattacagaaaaattcacaaaaatagatgcaaaggaaaaaataatgttacattattagcaatgtcttctgcgggctgggcatggtggctcacgcctgtaattcagcactttgggaggctgaggcaggtggatcacttgaggtcaggagtttgagaccagcctagccaacatggtgaaatcctgtctctgctaaagatacaaaaaattagccgggcctggtggcgcctgtagtcccagctacttgggaagctgaggcacaagaatcacttcaacctatgaggcggaggttgcagtgagctgagatctcaccgctgtgctccagcctgggcgatggagcaagactctgtctcaaaacaaaaacccaacaatgtcttttgtgtgagctttaggtgaataaatgtagtatttgtccatcattaaaagttcaagtacataattgtgtttttacttccccacaggatttgtcccatgccaccattgaaatgtatacaagcattgggaggattcgatctgctaagtttgttggaaaagatctggcagagttttacatgtaattgattttgtacttttctttgaattctaaacatacaaataacacgagaagatttgttatatatggagttagtataaagtgcacataaatttgtagactgaaaagtgtagattctcttacccagtcctcataatttttttttcagtttcttctgaaaaccagatggagagattttctgcttgttactcttaataactgttattggtctttgaggttcttttatttaattaaatatatacatttttgtaactaagtttaattaaagaattataagacagtataatggtgagtaaattggcatatagattcttacatattttgttatatagcatttctctaattttatcaagtattaagaggactgaaaaacctcaaggccattgatgtaaagctactgcatgtgtcaggttcatgaaagagggatgatctagggatgactggaagaaggtgtgtacaaagactgcagggtttccattccagctccagctttgaagtttgattccagaaaaactcaaaatttagcgtatttctggtgtgtttcataaaatcagactatcaaagagaagaaaccccagtgggtcatgtggttaccatttcagagtactcaaaggagatacaagctataaggaaaaagatgcttgttttcattttctaaaaaaaaaaaaaaaaaaagtgattgaaatgagatcttgaaatctgtactcaagtgatttcattaggtgaagcaagaaatgagaattgatttgaactgatgtgaattggctggaaagggattcttagatcagctaagtgaactttctggttttccggatgtggttggagcagctttgccgattacccactggttaacagcagagtcacagctagaatgtagctctcttgaacttccatgctgtgtatctgaagaggaaggtgctccttaaggaagcagagaggcttctcgggaaaggggaggggatccttgttgctcctgaggctttgacaagcccttattaatttgcattttaaaggcaggcaaggccgcacacaccagtagtcccagctacagtggaggaggctgaggcgggaggatcacttgagctgaggagtttgagactgcagtgagctatgatcacaccactgtattccagcctgagtgacagagcaagaccccatctttaaaaaaaacagttgtgctttaaactttgctttgggggccaagtgtggctattttaattctccggcgttctctggaagctggatcctgtggagtgctctttgcctgagtttccaagtggctctgtgctcccttccgcttgcgccctgtagactgcttctgtgtttctgtgcctttagtaggtagtgtagacccatacttggacttcctggcttcattgctgactagcagtgtacttgtggacaagcccttccttcaccttctcttagccttggccctcttgcctgtcagcttgagatcatgaatgataggctcactttcttatcctgagattcagctatgaaagttcctcgacatgtgtataaagccagaccaacgatgtgttgtgctcttatcaccacacgctcatttctcagatctttgcctgggagtctaattatgtcgtcctgagtaggtactctttctcacggagtggggtgggtggaaaagggctatctagagatgttgagtctgtcctggcatggggtctggaggatggaggccaaagcgggagagatggggtttcagtgtgttgattatccctagctgtaatgaaagctactgtttgttgactttgcaaggaggaaaaaggctccacaaaaggcagaaatctatcttcaaggagcactgaaaaactacctggctgagggctgggcactccccatcacacacacaaggaagcagctggccgaatgtcaaaagcaccttggacaaattgaaaagtatcctttaatgttttcatgaagcaggaaaattattttctgtttatacggcaacattgcccacaatcaatgtttcattcacacctattattaaggagagaaaagtcctaacttatacatatgtattgtatagaaaatgaatgaaatgtctagtcgattttttataatctaattttgagccctagtaacttaaaaaaaaaaagccctttggcttttgaagcctctgtgaaggccgtaggagactttgcatccacttccccccgcactcctaagtatgagcctctccacgctccttacctctccgctccagctacctgcagaccagcagcctcttagccagtgaccaccacctcactgaagaggagcgcaagcacttctgccaggagatacttgactttgccagccagccgtcagacagcccaggtaagaccagttcttacaacttgactaggaatattttcaaatattacagaagtaaaaaagaatacaagatataccaaccacttacagtaaacagttgctaacattttgctgtgtagctgacatgtatctatgtctttcacctgacttttttttttatttttgctttaagtcaaactctagaccacattagatcttctaaaaataaggacagtctcttaaccacacccaaagaattaataaggttctaatatcatctgctaagtaggccatattcatatttccctaattgtcttaaagtattttataaatcatttttaatggagtccaacaggatatcacatattacatgtggttgttagatctcagttctcttttaatgtaaaaaaagttcttcccatctctttttcttcttcttcttttttttttttgagacagagtctcgctctgttgtccaggctgtagtgcaatggtgccatctcagctcaccacaacctccgtctcccgggttcaagcaattctcctgcctcagcctcccaagtagctggggttacgtgcgcccgccaccatgccctgctaattttttgtatttttagtagagacagtgttttgctctgttggccaggctggtctcagactcctgacctcaggtgatccacccacctcagcctcccaaagggctgggattacagatgtgagccaccgcacccagtctttttcttcattttttaagatggtgcttttttttttttttaaaatgtaacagcattattgtgatattcacaaaccatgtaattcactcatttgaagtttataattcaatggcttttagtctgtttcaggaatatgtgcaaccattaccacagtcaatattattgttctttttttttttcttttttttttttttttttttgactatcttgctctcttgcctgggctggagtgcagtggcacgatcccagctcactgtagcctcaaccttctggagtcaagagatcctcttactttggcttcctgagtggcagggaccacaggtgtgggccaccacacccagctattttttttcttctctgtctcccaggttggagtgcagtggcatgattgtagcccactgcaacctctgctttttgggctcaattgctcctcccacctccacctcctgtgtagcttggactacaggagcataccaccatgcctggctaatttttgtatttttagtagagatggttttgccatattgcccaggctggtctttaactcctgagctcaaggaatctacacacctcggtctcccaaagtgctggaattacagatgtgagccaccatgcctggccaccacagtcaattttaaaacatatttatcaccctaaaaagaaaccccatactgtaatccccaaagtgctgggattacaggcgtgagccaccacgctgggccccagatgcttgtaagtgaatacaccccagcagtcaataaccacatcaacctgaccctgaaacttctaggaacttctgcctgccctgggaggccggggcaggcagatcacttgaggtcaggagtttgagaccagcctgggcaacatggcgaaaccctgtctctacaaaaaattagccaggtgtggtggcgggcacctgtagtcccagctacccaggaggctgaggtaggaggatcgcttgagcccaggagaactgggctgtagtgagccaagatggtgccactatactatagcctgggcgacagagcgagaccctgtctcaaagaaagggggacaacaaaagatccatgtgggtgggtttctcgggagcatcatgacgttagtctgtggagtctttaacgcgcccaagctgactgttggtagagccgtgaccacatctgctgctgctttgtatttgagactatttgagttgtgatgttcctgccaacgttccttggtatctctatacgaataaaatattccacaatcgtttactgtttctcatgatctatggcatcagtcttggcaagtcctttcgttgatgaatatttaataaatacttaactggtcacttctgcagccttgtgtattttctagacaaaaccaaggtacttacagttcggtcagagagagaagggcccagagagagcattaggctctcattccagcagcaactgtagacctggctggttgctgccatcctgggcctgggggcacagaggggtcctgcttaatcggctgactttgtagactggcagacacctggggtttgtttccacatcacagcagggcacttgggcatcttcactgagcatgtttttaagtaggtgagaaaatattggaatcccttggaaatagctgtagaaattggactatttacaaattgtcgtttgaaattgagaggtagttgacctgtatttctcttaggtttgtcaaagcagacttgagaaggttaatttctgtacattttatgatttctaggcattacgtaggtatttgctaatattctgcttttgatacaatagcctttggggggtgtgaagatggcaggaggctgggctcagctgctgtgcccatcactgctgcttgcttcagtctgctctcggtgatcttactgtgtccgcggcctgctgctgcttactgtcaggaagtgtgacttggggagtcacttacgataatgtctatttacaggtcataagatagtgctacccatgcattcctttgcacaactgcgagatctccattttgatccctccaatgccgtggtccacgtgggcggcgttttgtgcgttgagataaccatgtacagccagatgcctgtgcctgttcacgtggagcagattgtggtcaatgtccacttcagcattgagaaaaacagctaccggaagactgcggagtggcttaccaagcacaagacgtccaatgggatcattaactttccacccgagaccgcacctttccctgtatcccaaaacagtttgcccgcgctggagttgtatgaaatgtttgagagaagcccatctgataactccttgaacacgactgggattatctgcagaaacgtccacatgctcctgagaaggcaggagagcagctcctctctagagatgccctcaggggtggctctggaggagggtgcccacgtgctgaggtgcagccacgtgaccctggaaccaggggccaaccagataacattcaggactcaggtatgcgttcagggtgggaacttgactttcaagtttgtaaagcagggccgtggagcttacaagaactgtctggagtgtgctgtgaattgagtagagtcctttgttctcctaaccctgtttttgtctctgtccttatacaaaaatacactgatgttttctttcgtgttttatacaattttctgacatttgataaattctgagtgaagttcttaacgtagatatttgttcttagattaagttagctttttaactcattggattattggattcagttagctttcccccctgcatatgaaaatacacaccctcatttgttaaaatgagctttcaaagaaggtggtacactttcccactcaaacttattttccttttgtggctggctgggtgtcaaaactggtgtttctcacccactctaacataaagttttctctgacacaggatatcctgtaagttccactaactcaacaggatttggcctgtggaaagtacagctatttgtcacattttttagtctagggcagggcttaaatctcgtgctgaatgtctctacaatgccacaaatacagtttagataagttgaaaataccttattaaagttaaatttaagcatcagttactcagaaaatcacgaattgagagattctgagggccttgtgaagagcccaagcttagaggtttaggcacaagagcagggggtacaagagggaaagaagtacaggcctttctggagttcagagagaccgctgcaccgcgctaccgcaggaagctaactgcaaaactgggtgacgtggtttcaaatgcctgattctttgactctaggccaaggaacctggaacgtatacactcaggcagctgtgcgcctcggtgggctccgtgtggttcgtcctccctcacatctaccccattgtgcagtacgacgtgtactcacaggagccccagctgcacgtggagccgctggctggtgagtggggtccccagcctttgaggaggcgtgctgctggggcagttctgaggagacctgctgagatgccaggcttctcataagttttagctgtgtctgcctttaagagatattttgggtaacataatggaaattttgcctgggaactagctgactgcctcttttgtttatctgaatgtttgctttcctgtaattgctttttcatgtttaataaacatggtgtatctgaaaataagaaacacagaagaattagctctgagagtggaaaaaagaaactcaaggtatttttttctattggctcactcaacctaatggtcaatgcagaggacttctgggcccaaatgtgcagggatttccccctgccagcaagcaagcagtcggtcctgcaattcagttctgaccctgtctactggagctggcgtcagacaccacagggtgagggctcagtccccaagacagtcccccccttcccatgccagccaccagcccagggttcttttgcttgtgctcctgaccaactagctagaaatcagggctctcacaaccccctttctgggtttgatgaatttgttagaacagctcacagaactcagggaaacaggttgactggattattataagggatatagatgaagaagtgtggagggtgaggtatggggaaaggggtgcagagcttccacgccctccctgggcgccaccctccaggaacctccatgtgttcagctgcctgaaagctctccagaccctgtcctttggtttttatggaagtgacattacacaggcatgatcgattacaccactggccactgatgagcaactcgaccttcagcccctctttcctccctggaggttgggtgccactgctgaaaggcccgaccctctaatcctgccctggtcattctggtgaccagtcctcatcttgaagctaccttggagctgccagcctccaatcaactcattagcctacaaaaagacatcactttggagattctaaggaatttgggagctagtatgcctggaaatggggttgaaaactacatgtgtattttacagtgtcacattaggccaagaagcagctaatgtctaccacagggtttcataaatatgtatataatttcctgcttagaagtacgtttcaaatgctaaacactagatttagttaggatctatactcagatcccagcactttgggaggccaaggctttgagaccagcatgggtaagccagtcggggcaggatgacaaaaccccatctctgcaaaataaaaaaatgaagtaaattagctgggtgtagtcgtgcgccacggcctctagtcctagctacaggctggagccccagctgaggctcctgcctcagcctcctgagcccaggagtttgaggcctcagggagctgtgattgcgccactgttctccagcgtgggtgacagaacaaaactccatctcttaaaaaaaaaaaaagttttcctttgaaagggttgattaaacttgtccgtctggcatggcatttgagaaattcaaagctattgtcctttctgataagttctaaaattggaaggagttgctataaacaaatgattgaagaacatgtggcagctgaacaagagtgagtgaatgtctcctttgttcgggctagcaacgatttatttatttgcctgtttcttctacgtggaaaaaaatcacaaagggcatttttctgttattcccccattccccctatttttctgcatttgtgcctcttgtgtggccaccagcaaaggctgtcagatgtgggacacagcagtcagtctctccagtgattcttccattggaacattgtgtagagaagctgaactcgattcccgcaggggagccgaagcaccagccagcaggccctgccctccccatggcccagcggctgcagtgccaggctcatggcctggctcctgcttcctgcctagtgtcccctgtctctgtccactctccccccggtcctggtatcttgcctgccttctgtcttccctgcagcaggattctcagaggcctcagctcactcctgcctctcattgctgtcttggagtgagggggagccacctgactgctgactgttcttaacccaaaagcccgtggcctgaagctgaaaaatccagagaaggttttgaatatttgagcagcaccagcacagtcaagttttctttacagtctcttcttaagcctcattatgtgattctcttctactactaatgggcaggcaaattttgtgaccctcagagacgtagtcatgatcataatccctgacttgctgaaccaagatgggtataagactccttgactcacaggattcttttttccccagcaaggttctccttcaaccctgtagtccacatcattgagatgaaaagttagggcagaagggaatggaagtagaaggaattcatggagatcccaaaggagcaaatctttcatagtaaaagaaatagagcccctttcaccccattgcgggccctgagatgctgtcttccggttggcagcggtgctgagccacgatctcttttcctttagatagccttctggcaggcattcctcagagagtcaagttcactgtcactaccggccattatacgataaagaatggagacagcctgcagcttagcaatgccgaagccatgctcatcctgtgccaggcggagagcagggctgtggtctactccaacacgagaggtgaggtgccgcccacccaggcccaaggaggatgcccaccttgccctgcactgtgtgggtgtgagggtgagcctggccttgctgccatcctgctgagcgcccctcaacagtgtctggagtccgtgttccataggagccctgcggcctgatgcctgtgctggggtcccatctgaggtgataaactgagagtggttcacacgctgagtggccgagcagtgcttgtctggctgaggattaggagatgggggtcacggctggggtcacgttccatggtgatgcctgccagaccctgtcccccttgggctggccctgctcccgagaagcaaaagcagagcagcccttgcaggtgctgttgagagccctgagcactcccatcctcccagccacgaggaaggggaaggggaggaccctgctcccctggggtgggggtggatctgcggatgagctggaacgggagaaagtcatgcagggacctacacaggacttgggtgggccccgtgggaaatgcccttttcctctcttcagattgagatcaatgatgggtctgggcgcctgcctgccggctttcacacagggctgctctgtcctaggggccttgttcttgggtttgcctgccaggtgcgcaggagcgggagaggttgagcagtggcctcactgctgggccatcacctgctgtaaggaaaaggacaagtgaaaccgagggaacagctttgaagtgactttttctgtccttcgtagaacagtcttctgaggccgcgctccggattcagtcctccgacaaggtcacgagcatcagtctgcctgttgcgcctgcgtaccacgtgatcgaatttgaactggaagttctctctttaccttcagccccagcactcggaggggagagtgacatgctggggatggcagagccccacaggaagcataaggacaaacagagaactggccgctgcatggttaccacagaccacaaagtgagtagggacagtggaggagcttagcttgtggggcgtccgccgcccgcctgcctgctgggaaaggcgatgtagcgatgcctgctgttagcctggctccttctgattcccgatgccctgggcatgtgtttagcagttctgtctgtctgtgaatcaccctttcttagataaggggtgcattttttgcaagggcagagacaagccagctctacctttccctctcagttccaggggccagggagtttgctgtaagaggttagggccggcttaggcatgaggggcgtaaaacttgggtcatgtccattagaccggtgacgaggccagaggaggtctgtgtcgtgtgtgcctcggtgtctgtccactgaaactcataagctcagccacggaggagctgtctcattttaggctttggtgctggtacttactgacagttacttgagaaagatgtgatttcggtcccagagccacaggatatcagctcatggaatgtgtcgctgcatcatgttactcagggtgtgcccaagtctcgtagcccagaaatcaatcctgagggccctgaaacagcccaggggccgcagtatacgcccaagagcagcgggggcaaagggcaaggcatgccgtctttccaaagcacggagtcaccagacaagtccacgcctgaagacgaatgttgtaatgttcagcttttgaagaacctgaggaagtgtctttcccttaactcacacagacgttcaccattcacgaaggtggcgcttagctcagcaggagcgcgcagcactggtggcacctgtgctatgtgccgtgttatcccgctcttccctggcgctggtggcacctgtgctgtgtgccgtgttatcccactcttccctggcgctggcggcacctgtgctgtgtgccatgttatcccactcttccctgacactggcggcacctgtgctatgtgccgtgttatcctctcttccctggcgctggcggcacctgtgctgtgtgccgtgttatcccactcttctctggcgctggcggcacctgtgctgtgtgccgtgttatcctcttttccctggcactggcggcacctgtgctgtgtgccgtgttaccccgctcttccctggcgctggtggcacctgtgctatgtgccgtgttatcctctcttccctggcgctggtggcacctgtgctatgtgccgtgttatcctctcttccctggcgctggtggcacctgtgctgtgtgctgtgttatcctctcttccctggcgctggtggcacctgtgctatgtgccgtgttatcctctcttccctggcactggcggcacgcacgctgtgtgctggggtattcacctcttccctgtggggaataaggcttgagacttgcttccttcctgcccttaagggatgtaatagctttgtcctcactgtgcccctaaactgatttggttttcagttacatattcagcctcacatggattaaatgcttagataattcattaactatggagtagttactgattggctaatgtcatctggaaatacatgactgaaagcactttgtcaaaaccctgtgcacattgcaacatgcatggctccgcggccctgcgtgtatgggagcagcaggtgggtctgctgcttagaggacggctgtgctcttccgccgttgaggtgactctggtgatgtgtgcatgtcttgccagttctgcgttcgtttctcttgtctgtatgcatagcttcctgtttctcgttggtttgtgtatgtgttgggtaaggctttgcttcctggataatgagtggttgaagccataataaaatgtctagggcgtgggcgggcactgcaggtgagtctgggcagcagtggtggtggctgtgctgtccgtcggcgagtggtctgagagtgtctttgtgcttcctcctcaggtgtcgattgactgcccgtggtccatctactccacagtcatcgcactgaccttcagcgtacccttcaggaccacacacagcctcctgtcctcaggaacacggtaacggaggcgtagcgtgcgggccctggcttctttccccagactcttctaagtggaggttcctaatgttcaaaactggccttcgtggtgaccaaggatgtcttcttatgtgaccacaaggccattgtttgtgtcttaaaatccacaattccctggtgtcctgtgacatccagttcatattcaggttttcccaactgtctgaaaatgaccttttatggttgctttgtgtgacttggggtccaaaatctccatcagaccactagatctctgttcatcctttcttccctgttttcaagccatcgacttgttcacttgcaggccaggtttcctctggacgcccgcctttctggatctggctggatttgttaactagttctcctgtccctgtatttcttgtcaattgcctgcaacctctagaacaggagcttttaagctcagcattagtgacattttgggctagataactctgttgtaggggctttcctgtgtgctgtagggtgttgagcagcaccccaggctctcccatgagatgccagtagcactccccacctgcaggtgtggcagccacagatgtctgtagacactgcccagtgtcctctgggtggggcggacgtgccccagtggaaaacagctgccctaaaggcttgagtagactccagttctgctttgaggcaggcggggctgtgtgcttcctgttgactgcaccgggaggcccacggtgtccaggtgtcctaccttagtgacggtgctagcgttgatcaatgggctcgggatgctagcctggcctctcaccacaactttttatccattgatgatgtgtggataatttggaaacaaaaacgtcagacccatgtttagaatggaacattatactagcagcttttttccccttcaaatcacagcaaagggaactgtagatattaatagttaaaaacatcaataatctctaaaagaaccttattaaaaaattatttttcagccgggcgtggtggctcatgcctgtaatcccagcactttgggaggccgaggcaggcggatcacgaggtcgggagttcaagaccagcctgaccaacatagtgaaaccccgtctctactaaaaatacaaaaattagccgggcatggtggcgggcgcctgtaatcccagctactcgggaggctgaggcaggagaatcacttgaacctgggaggcagaggttgcagtgagctgagatcgtgccattgcaccccagcctgggcgacaagagcaagactctgtctcaaaaaatagtaactattattaatattttcaaagttttgcatgtaatggaaatggatataagccccgcctatcatctctcaatggagagtcttcacctgtaatgaggagggctgctgctgtctccccgtggctccccaaaggccagtgagggtgaccagccatgatcacttaataaggctggtcagaaactatattctttcttccattgcctcacagaacttgcctctttaaaaactttttttatttatttttatttgttatttttttgagatggagtctcgccctgtcaccaggctggagtgcagtggcgtgatctcagctcactgcaacctccacctcccaggttcaagcaatgctcgtgcctcagcctcccgagcagctgggattacagacacgtgccaccacgtctggctaatttttatatttttagtagagatggggtttcaccatgttggccaggatggtctcaatctcctgacctcataatctgcccacctcggcctcccaaagtgctgggattacaggcgtgagccaccgtgcccggccaaaaaggtttattttctggcacttttcggtgtgaaatctgaagggaaacttatgcaacaacttagcttactttgctttgttgcttttttgattccccaggcagagagggtctccttaacaaagctaagatatatttaataaagttcttacatatcaaaataatactttttgtttttccactttaggaaatatgttcaagtttgtgtccagaatttgtcagaacttgactttcagctgtcagatagttatcttgtagataccggtgatagtaccgacctgcaactagtaccactgaacacgcagtcccagcaggtaaacattgtgtagacctgagcataaacttctcaacagagaaccagagtgtacggaaatgatgtagtatgtgttgcgactgagcctttagatagaacagctgcactgctgatgagtaaaggctcctgtgcagctcctccggctgccctgaggctggatcgaggcttgctcctgagtaagcgggtggctggatggatgaattcttctttttagaagaattaaatctgaaactggtcccactctatgcgtagacgtgtgcagatccaagcttctgtttgaacgcactgttgattgcatgggcactgctccactctgcccagagcctgatgcctgccagtgccagagcgatggtgcccgacaccttggtgcctttgtaaaagagccatgcttgtgcctgcatctggaccttgctttttctgtttatggctcgctgcctggatgaatcttgaacttgctttttccgtttatctttcacgtgtgtttttaggcagtaaatgctgagtgtttagagatcaaaggcttccttaatggatgtctgaatctcagcattttcaaaggatttgcccccactaatcctttagctctttcagatatcactgggggctcatcactgtgcttttaggtgtggactttacatgtaatagcggtgttcagcccctgcattaggttgtgctggttcctaaaataatttaaatataaaataattggctggatgtaaagattactttttatcttattttttaaatttttatttatctttttttgagatggagtttcgttcttgtcgcccaggctggaatgcaatcgtgtgatcttgcctcactgcaacctctgcctcctgggttcaagcgattctcctgtctcagcctcctgagtagctgggattacaggcacccgccaacacgcccagctaatttttgtatttttaatagagacgtggtttcaccatgttggtcaggctggtcttcaactcttggcctcaggtgaaccacccaccttggcctcctaaagtgttgggattatagccatgagccaccacctctagccaagatgtactctttaattaattgatgatatattcccctgttttggagctgcatgggatatgctatatattaattaatatcctttgggcatggtggctcacacctgtgatcccaacactttgggaggcccagatgggtggatcacttgagctcaggagtttgagaccagcctgagcaacgtggcaaaccccatctctacaaatacaaaaattagtcaggcatggtggcacacacctggattcccagctacccaggaagctgaggtgagaagatctcttgaacctgggaggttgggctgcaatgagctgtgatcacaccacagcactccagcctgggtgacagagtgagaccctgtctctaaaaaagggaaaaaaaaaatcagcggggcgtggtggctcacacctgtaatcccagcactttgggaggccgaggcaggtggattgcctgagctcaggaattcaagaccagcctgggcaacacggtgaaaccctgtctctactagaatacaaaaaatgagctgggcatggcggcgtgcatctgtagtcccagctactcgggaggctgatgcggaagaatcacttgaacccaggaggtggaggttgcagtgagccgagatcctatcactgcactccagcctgggcgacaaagcgagactccatttcaaaaagaaaaaaaaattaagctactttttaatgatctcatatgatataaaacttatggtatcataaaaagttaaagatttaccaattttgtacaatcttctgctgggacaaggccaggcaaagggagtcagggcagggacaggtgctgtggggcctaaagcagcatgcataggcgtgctgtgaggcggggcctgcccatggtgtctgctcagcacccttcgcatggcgtgtgtttcgctgcagtgtctgtgtcctctttgcggttatggtgctgtgtgagcagtgacccccaactctctttccagcccatctacagcaagcagtcggtgttcttcgtctgggaactcaagtggacagaagagcctcccccttctctgcattgccggttctctgttggattttccccagcttctgaggaacagctgtctatctccttaaagccgtatacttatgaatttaaagtggaaaatttttttgtaagtgatgtattattttgggagggtgggggtgaaaaaatgaaagatggcattatgttctttataatctgaagaactgaatagacagcttctgtcaacataatgaaggagcagctggagaaaaacagttgttggggtagttgaatcattgactgtctttattttagaaccccaggtccttctcaagtgacacatctgagatgcccacactcctgggggcatctctaagaggagtgtttgtcatttggaaagcccaaagattccttttttcttctatctttttccctttctcatgttgacttagtaactccctggaaatatttcttggagtcatttcatcttcaggggcattgctttctaaggcatatctctagtttttcaaagaaaagctgaaaacatatgaaaacctgctagctgagtattgtgaagattttcttagaacttgtgcatcatttggtagaagccaatttgagtgtggaatgaagagtagccttgagctaggtgagtagatacaggtgtgtgctgtgttcctttagggagatgatttgacttaatgttttgcaattttgtgatactttcttttcttctctttactatttgaaattatcaaacaatgtttatttgaagtgtttgtctttatagttttgatattagcagtttttttctatcttcttccatccaagacaaattgttttgaccttcatgttttatataactctccttaaataaatttaaatgaataaataaaaccacaaattattaaataatttaattaaatcaaataatagtatatattataataataatttatatataaacaaattatttatttatgagacaaggtctcactctgttgcccaggctggagtgcagtggcacaatcatagctcactgcagcctggaccttctgggctcattatcttcccacctcagcctgccaagtagctgggaccacaggcacgtgtcaccacacctggctaattatttttattttattttatttatttatttatttatttatttattttcgagacggagtttcacacttgttgcccaggctggagtgcaatggcacgatctcggctcaccacaacctctgcctcccaggttcaagcgattctcctgcctcagcctcctgcgtagctgggattacaggcatgcaccaccacgcctggctaattttttgtagaggcggtgtttctccatgttgatcaggctggtctcaaactctctacctcaggtgatccacctaccttggcctcccaaagtgctgggattacaggtgtgagccactgtgcccggctaaagtatgggtttttttttgttttttgttttgttttgtttttttgagacagagactcgctgtgtcgcccaggctggagtgcagtggcgcgatctcggctcactgcaacctccgcccctctaggtttaagcaattatctgcctcagtctccggagtagctgggataacaggcatgtgctgtgccaccacgcctggctaattttttgtatttttagtagagatggggtttcaccatcttggccaggctggtcttgaactcctgacctcatgatccaccccgcttggcctcccagagtgctgggataacaagcatgagccgccgtgcctggcccaaagtacgggtttgtatgttgctgtatctattcaattctcctggtaaagacctgagtggaatttctgggtcatagggtaactctgtggttagctttttgagcaactgccaactttttccagagggctctacattcccaccagcaacatagtggattccagctgggacccagagagtcccagcttctgtgtgtcctgccagcacttgtctcactgtgtttttggttgtggctgtcccaattggcaggcgtttccccagtggctggtgatgtgctgcggctcgtgggcgtgtggcccatttttctgccttctttggaaggatgtctgttcagatcctttccccatgtttaaatagggttatttgttttttattattgaattgtaagttctttatatatcctaggtaccaggtccttatatatgatttgcaagtattttcttccatttgttgtcttttgaagcaccaaagttaaattttgatgaaatccaattcaactctctcttttattgcttaaattttttgctttggacctagaaaatcattgcctttggtcaaaaagattttctcttgcatttccttccaagatgttcgtaatttgagcacttgcatttaggtctgtgatctactttgacttaatttctgtgtatggtgagaggtagggtccaaatttgttcttttcaaatgacccagcaggtgtccctatcccatctgtcatgacgatgctttcctccctgcagggtggccctggcccccttgccagattccagctggccgtcagtgctcgcgtgtctctctgaagaggctctgcggttctggtccctgtgcctgagctccaggtgccgccaggtgaggcccctgctgctcgccttgggctgtgctttcccccagccactctccttcccagatgcagcccagagcagcgttcaggcacacgcaggtctcatcacaccccactgtgtcctactgcaactctgggtgtccttcaagccctgaggcaaatctgcattctttgctggattcagaaacattcagactgtgccccagccagaagcttctgaggaggaggtatttcagtgggcctctagcacagtgttctactgcttcagttcccaggacctacgggcacccgggcccacggctggcacttttgcatctgtgtatttgggatcttttctgccctgtggcttgagagccccaggaagtcccagcatggcccctcttgagactggtgggagtttgtcccatgtccgaacagaggtaattgggcatttggtaggagatcacctagaaaggccgctcttgggactgctgtttaggctgtgaactcccataaaacggcttcatcttggcctcagactccagacaaatgcttcttaatatactgaaatctcttctttgaacattttacaatgccaatagaacactttttaagtcaagctatactgtattacacacgctcgcgcgcacacacaacgcttcccctcagaagtggaactgccaggttgtagtgcatgagccctttttcatcttggcagtggcagatgtgttttgatcgtttgtcatgggtggtggtagaatgttaagcatgtttgaatagccaccgagaataggttgattatggaaagaaaacacggacaaagtagattatggactgaattgggttataccaaggaattcctgttgcttttgctagttgtaataatagcattgtgttttggtaagaaaaaggccttagtgtttagtaatgcatactgaagcagatggggcaaaataacaggttgtctgaaatttgctttatttttttattttattttatttttttagacaagagtcttgctctgtcacccaggctacagtgcagtggtgcgatctcagctcactgcaacctttgcctcttgggttcaagggaatctcctgctaagtaatccaagtagctgggattacaggcacctgccactgtacccggctaatttttgtatttttagtagagacggggtttcaccatgttgcccaggctggtctcgaactcctgacctcaagtgatctgcccacctcggcctcccaaagtgctgggattacaggcgtgagccaccatgcctggcctgaaattcgctttaaattacctcaggcaaatacagaaatgtccatggcttgataagaggatgctgaggcagcaagatgctgagatctcaggatctgggtgataggcggctggaagggctctgtgctatcctttcttcctgtggttgaaaatgttcataatttaaagaaggatgttaaggttcggagtgtaggacttccgaaaacattgcatctccagtgggaattattgagagtgagtggcgacagttgctctaaggccagccgagcagataggtgtctatcctcagctctccagggtctgtgggcagctctgctttttcctctagttgcatttcttgaggccacttaggtacatttcctttctattctctccctttcctgcccagacattatacaacgtgaaggctgagatctttcccccttcgggaatggagtattgcagaacaggctccctctgctccctggaggttttgatcacgaggctctcagacctcttggaggtggataaagatgaagcactgactgaatctgatgagcatttttcgacaaagcttatgtatgaaggtaggtggtctcgaacccatgggctcaagcagtcctcccgccttggcctcccagagtgttgggattacaggtgtgaggcactgcactcagcctatcttgcattttgaatggctcttttacccaggcatcatagcgttacaccctgtgccattagtcatgtgggaaacatggtttcctgagttgtgcagatcttccaaatgtgggcacctttcgtttgacaatatttttttaaaatctgcatttgtgatctctcagggagggcttggagcatcagaactctttcaagctcacagtggcaagtgtaagttttccaaaattctgatttttgcttaaagtctcagatggcatcattggcagcaaatagtcgtgttgttttctttgaagtgacaggcttacatcattcatttttaatcagacgtctaccaaatacccaacactgaataactagcttccccagcgctcttgcaagtgaaaagggcgttctgtgaaaacagcggctatttcagctcgcagcaccgagcgctccccgtgtgctttccctgagccagctgtcattctgcagcagagacccagagaatgtcaagaacacaagcactcaagaatggaaataactcaaacgtccttcagctcgagagcggttaaactggcacatctgattcctcctcagcagtgaaacagaagggactgttgacacacgcagtgctgtggttggatctcaagggcattatactaagagaaaaacgccagtcctataaggaggtgtactgtgtgattccatttctaaatgacatcctcaaaatgccagcctcagaaggagagcgggtcagtgttccacggagcagtgggaggcagcaggaggccgtcctctgtggtaatggagagttctgggccagggccgctgtggttgttacacgaatctacacatgtgacaaatgccatagaattagacccaaagaatgcctgcgaaagctgctgaaatccagtggggtctgcagcctggttcactctgtagtgaaatccagtggggtctgcagcctggttctatctgtattgaaatccagtggggtctgcagcctggtccactctgtagtgaaatccagtgtggtctgcagcctggttctatctgtattgaaatccagtggggtctgcagcctggtccactctgtagtgaaatccagtggggtctgcagcctggttctagctgtattgaaatccagtggggtctgcagcctggtccactctgtagtgaaatccagtggggtctgcagcctggttctatctgtattgaaatccagtggggtctgcagcctggttcactctgtagtgaaatccagtggggtctgcagcctgggtcactgtatggtaccagtgtcagcttcctgtgttacacgagatggcacagttgggtgaagctggtgatgaaggtatgtgacccctctactacttttacaacttcttgtgagtctataaacatttcacaattaaaaaaaagtctactcaggagctgaatttaataaaatgagcacttttgactgctttgtgaagcgtggcatttttttttttgtttttttgctgtgagttcatggtagtaaagaacatgagtgacatgactgcgcagtctggcccgagttcatgccattgtggttgccccagcagcgcgaggtcagcagcgtagaaaggcagcagtgtgaaagctatgagcttgcgggtgccctgagagccacactctgagaactgtcactcctttgccttcctcctgacactcctagggcctctgcatgtcctgtagtagctcctgtcctcaaaggtcccccatccccaactacaggatgtccacctccctgagcccttctctgctgctcgtggccttctggtcactcactccccctgggcggttgctcggtatcctcatgatgggaagctgtgacctctttaccaggtctactgctactggatggcaaggatcctgtcttgcttactttcatatctccagggctagtcccagtgaatgatcacttaagtgtttgaattgcattgaattacatgatggttgtgttttaataattaatgttaataataacacctgccatatattaagacactaccatgtcccaggagtggtactaagtgctttacatacaaggggtcttcaaaaaaatcatggaagatacgttatgaaaaaactatgcatggatttcaacactttttgcaccaaaataagctcctactcactgagcaggatctagtttgaggcactaagaaggataagacatcagttttaaaagagcccctatcagagcaacatgaattctgctaaaattaaatcaagaaccaacattggccgggtgcagtggctcacgcctgtaatcccagcactttggggggctgaggcaggcggatcacctgaggtcaggagttcaagatcagcctggctaatatggcgaaaccccatctctactaagaatacaaaaattagctgggcgtggtggcaggcgcctataagcccagctacttgggaggctgaggcaggagaattgcctgaacccaggaggcggaggttgcagtgagccaaaattgcgccactgcactccagcctgggcaacgagcaaaactccgcctcaacaacaacaacaacaacaaaacaaccaacatcaaatttatggtgaagcttgggtggaagaatggtgaaatcattgatgctttatgaaaagtttatgaaattctttggacagtgccccaaagaattagtagtttgcaaatggatatcttgttttaagaagggacgagatgatgctgaagattaaggccatagcaagcagaccatccacatccattttcaaggaaaaaattcaccttgttcatgccctaattggagggaactgacaacagcagaaatgacagccaacaccgcagacatctgaactggttcagcttatgcaattacgcctgaagggtgagcaagcgttccactcagtgggtgccaaaaccctagtacccaggtccgtggccgaccagagcagagcttcccatggaaacttcaaacacacgggatcaagatcctgaagcatttactcaaagaaccataacaggagatgcagtgtggccttcccagtaccatcctgaagacaaagcagacacggcaatggctaccaagaggtggggtggccccaccaaagcagaagcagactggtcaagagcagaggccacagcaacaggtttttgggatactcaaggcattttgcttgttgactttctggagagtcaaaggacagcagcgtctgtgtattatgagattgttttgaggaagatagcaagagctttggtagaaaaacccctggggaagcttcaccagagagtcctcctccaccacgacaaagctcctgctcattcctctaacaagcccaacttcgtgagggtttctatgggaaatcatgaggcatccaccttgtggacctgattcggctccttctgactgattttggtttcctgatcttaagaagtctttaaaaggcacccatttttattcagctaataatgtagagaaagactgcgttgacatggctaaattctcaggcctcccagttcttcagggatggactaaatggcatcgtaagcaatggcatcattgcttacaaacatgtcttgaccttggtggggcttatgttgagaaataaagcttatattttctgttttcatctttggattccatttttgcatgaactttttgtagttccctcatacgtattctctttccatccttaaaaagcagctctgtgaggctggtggtggtctcagcactatacagcggtcattgagcctggaggccttggggtgctcttctgagtggcagagttggcttcagacccagtggtcttggatactgccacttaccagacagaacccattaactgccaaagtcaccatactgtggaagatgacacaaaaatttgaaaacaaaattaaatcatttattaacctcacaggaaaaatgcagttttctgtacacgtccagcataattcattctaatccagaactaattgaaattggactcaatgaaataggggttgccaccgtgaaagtgcatggctttatcttcaggcgcagctacaaggcactgggctctgtgtccgcagtgttttgtcagacagcgttgggtgagaggattgggtaacgacggccgtgactctcgcctgagtactggaaggcccgtcctggatgacacatcgcttcctctcgtttcagttgtcgacaacagtagcaactgggcagtgtgtgggaaaagctgcggtgtcatctccatgccagtggctgctcgggccactcacagggtccacatggaagtgatgccgctcttcgccgggtatctccccctgcccgacgtcaggctgttcaagtacctcccccatcattctgcacactcctcccaactggacgctggtaaggactttggaagaaaaagtttaccttcagtatttgagcaggtgagcactttgtgcgagaggtgataaacttatgactgagcaggttggagaactagcggcgtgttttcagtgccggtagaaactggtactagaagcctcatccgctgttagaatcttaggcacctgctctgaaagccaagcctctgtgcacagagtgctctgtaaaggggcagcctcgggtggcattctgcacgttcagcctggctccgtgtggctttgcccgtccccaggtgagtgtcggcgcagcttgggtctaacttcctgtgtgttttgcagacagctggatagaaaacgacagcctgtcagtagacaagcacggggacgaccagccggacagcagcagcctcaagagcaggggcagcgtgcattcggcctgcagcagcgagcacaaaggcctacccatgccccggctgcaggcactgccggccggccaggtcttcaactccagctcgggcacacaagtcctggtcatccccagccaagatgaccacgtcctggaagtcagtgtaacatgacaacgccagggtgaacacacgccacttcccagctaggagtgcactttatgggactgtgactggactcttccgttctggctccagccagaccttcagtggtcctgcctggccgtggggacatcagagagtgtcatcacgcagctggccagctgagttctgttgttgttttcatgccgcctgtgatctcagattcctgcttttctcaccccgtccccatgctggtgtccgacgccgcttactcagagccctggcctccctccccctacctcacacgctgctcatgaaagtttccacccacgctgtctccacggaacagcctccgtctgctggctcttcgtggaaggccatttgtctttcaggtagacactcagcagccctcacggtcttagtgacgtgtgtgcctttctggtcacacagctgcccagtttcctgatcggggtggatttgtgtcccctaaggggtaaaacagccgtttaccgcagatcctctcattgtgcttttctagaataacacccttctaggggaggcgggtgggggagggagggatcataaccccttctgtgccttgggatgccggagctgggggacctggaggcccatcagccggagccacgtgaaaggtactgaagaaagctgagacccggctgtgaggagcgcctcagcggtgaggtggtttagggataaatgtttctggaaccctgtggtcccccataatgttgatagaatatcatatgcactgggagttaaatatatttaatttaatgatcattatatatgtgggggttaatatgttgtttttctgtccctttaaagtctttacatgtaattgtagctgtataatcgttatttttcttttgcatcttaagtcttagaaattaagatattccatcgtgaggatgagagaggtcctcagtgtgtttttggtctggttgtagggaaggactcaagtcctggaatgtcctccactggtctactgagttgcagtcacactgttccaatggattatttgctttcggttgtaaatttaattgtacatatggttgatttattatttttaaaaatacagactaactgatgtaatgtttatgtataagttgcaccaaaaatcaaggacaaaaataagtgtgtttgtttttacaggtgtgaaagtcacagcttgtaaataagtgttgtatgtattaaaccttttccagttctccaaagcgatgtatttttgtacacttgaaatagagtactcttaatttactgggcaaatgtgcttggaattgaacttgacaagattagctcaagcagatagagtcgggtccagcagtgggtggccctcgtgtgaatccccgtggatgtgcaagttgtggagagaaggagcaccgggttcctgcccagcactgtgcttgcgggaggcggtggggcatgggaggaaggaggcacagaccggggaaatatgacagccgtcatttccagtattctctgtgttgtcttttagctcattcaataaataaaggtggtgtgatttttttttcctcctgtctttttcatttgtagaaactggagacgtgtaaagaagataaataattgtgtaattaaactttccagaaatttatcttcctcatgtgcagtttaacaaacttggtcaaactagttagcaaattagaacttcagaatctaatgatagtttagggtttctaaaataaggttttttattgtaaaaattgacgattgccctgcatttctaccaagtcctgtgaataaagagatgggagatttgattccgtcagaagagactgtaatccgtgtcgtcagcctgggagccttccccagtgtaatgtagctttctctcttaccttctggaagagggaatgtttcatttattactgtttgattttcttgtatctggttctactcccaggatgaaattatccaactacatatatatttagaggaagaaagtgaaggggaaatttaaaatgtttacggcgcttaattgcctggaaatgaaatgaaatcaaatttatcagtttttttccccctaattacccaaaagatcttttgcaaactatgttacatgaatgcttctgcctctttaagacaaagaagaatgtcacccaaaattgtcatttttttcttaatgttcatcataaaagtcctaaaagagtaactgtaattggatgtttattgtttttatctaaagtaaggtgtatgtgtttgagacaagctggttttgttgataaagagatgttaaataattgtgaagccagatatgcaatgtgtatctgaaaagcaaggaatttgcagccgttttacaaatatctgtggaacatgtaaatactgtcaaatggaaaataaaataagttataatttttgtgaatttcatgggatgtcctatgattggaaaaattataactcttctgattctaatgtggaaattgttgtatttaatctgaaaatgactttacctacaacagttccattgtcagcacagcctaggaaggtcagatcctgtattaattactcttagtggagatgccagatatcccatacagaattagcagagaaaatacacacaggcttctattcaaattttctttagtgcttaaaattaagttttaaaatgaaatcagacactgcaggtttgtatataaaatgaaaagctatactactttttacaaaagggcaaactgggctgatgtaaatgttttactttcaactgtgttctttaaaataaatcctacctggtttttaaattttatttttcatgaaaatgctcctttctctacatttattcatcctatatacatcaggctgtaagaccccccccagtcatcattaatacaatgtgttgggattctgtgactggaaaaggtgacaagttggtgactttgacactgcaggtattccattttcatggtttactatgaaaagtcatttttcatattatgtaatatattgttagattaaaaccattgtattaagactttaaaatgtaagcattgtaattctgaaaatacacattttaagaagaaactattttgcactggatcttttgctgcgacatggtgtgacaacagtatgtaatgtgaagattttattgttttatctccctagtccttgttcctgactcttgggcatagattatttgccttttgggaaacattcggattatttttttttttttttttttttttttctctgagacagtcatgctctgttgcctaggctggagtgcaatggcgcgatctgggctcactgcagcctccgcctcccaggttcaagccattctcctgcctcagcctcccgagtagctgggactacaggcatgcgcctcatttttatactttagtagagatgatgtttcaccatgttggccaggctagtctcgaactgctgacctcaggtcatccacccgcctcagtctcccaggcgtgagccaccgcaccggccagcattcgggactttattcataattccttacccaacagttcacaagaacgaagacatttgggtgtgcagcgctctcatgttgtggacgctgctgtgccaggctgggcgtccgtgcggagcgcgcccagcgctggagcgcgcctaagaggcgccctgcagtgtggctccggggtgtgggcggggcccggagaaggcccccgccttgggaggggttgggcctcgcgttcaaactccgcctcggggcggggcgagggcgacgcagctcctcctgcctcctgggccgctgcggacggtggtgcgcgaccccgtcccgggcgcgcgcgctgtgggcggtgcacgccgtcgcttcccggaagtgcgtgctgtgggcggtgccgcgcggacccccgggaagtgtctctgtgggcggccgccgggttgagctgcggcacacgtgcgacggccgtgatgaagttcgcttaccgggtgagcgcgggcggcgggcggtctgttggatcggcgcggctcttccggtggacggcgcctgagctggctccgggcgggctgggggcgcgtggtctgcttttgcggcgtctggccgcgtgggggtcgccggctgtctgcgcgcccgtggcctcggggacgcggggctgtggtggggctcctgggagagctgggacggaggcgccgacggcttctcggagggaacagggacatttgtcggggtcccgggatatttttaacctgagtatggcccaacctaaaggctggagttggtgcagtcggggagggcacagcaccctcgggagggatgaggaggtgggacggggcggggacgcgggcgcgcgcaggcggggtgagaacagcagggacccggggcccgggactggtccctaacgagcgagcgtccaggtgagcggaagggcggggaacccaggtgtgagctctgtttcccgaggccggagggaattcctgaggcggacgccctcagctttgagagccagggaagacttgtcccagatgtgaagtgcaggaggcgggtgagacaggtaataagagggggccgtggagccggcctgggggtctctgaagcgtttgctacagctggccggttatggggacgcctgtgtttcccacagtggccctgaccgttgcgcttccagggttgcacgggccgcctgctgctgagcccaccgtgtactacacttgtcctgtccgaaactgggcatggtactggcccctcagagtgctgctcctgtgtcccctgtgctggtggagccaccgctgtgtgcccagcaccaaaccagaaaccatatccacgtcctcacaggccaggacttcatccgctccacattcctactgcaaggtggcaaaaaatgtgccttggagcctgcctggccgcttaaagtccttctgctgaccaagctcctccctgaggtcctgagggcgctgcccactcacagcttcagggcctggctggtgccttcccatttagattccagctcaggtgacccttccaggtgcctctccgtgaccaccgtctaaagtagcccctgctcccacacttctcatccccctcctgctagagagagaatataaggtgtgcgtgtctgtgcgcatggcagtctccagtgaacgctcgtgctcgtgagttagtaaataggatgctggcttaccacacttctggaagccctgagttctaagcacttttggggtgctgttccattgttgcagcttttttcttggtgaagtgtgggctccatgcccctcttcacctggcagacgcctcctgtcttgggaggcttcctcagtgctcacaggggcatcttacccatctctgtgggagcttggggccgcccgggctcctctggtctcctgaggatcaggctcacttcttcctctcttacccaggaaaggtgaacgggcccccaaggtggggttctctatgccatctctctgcccagatgcctcacttagtgcttttctgggagtcgactgttttctttgtgttaagacaattttgttttcttcacagttttcaaatttgctgggtacggtgtaccggcgtgggaacctaaattttacctgcgatggaaattcagttatcagtcccgtgggcaatagagtcactgtatttgaccttaaaaagtaagtatgtgaaagtggtattcataatagtgatactgattactattatcaccattttttaagtaacatatgaaaactgatagtgtcttctgtgccttccttttaatggtgcacccgttaattaagggagcccaggacaggactacaggacagactagggtcagcagatcagttgtggaaattggcagccagacccagttcttcgttgtagtgccttagccaggccccataaagtggtgtgtcacttggctccgttctgtgggaagggaccctgtccctgtgctgtgaagggtgggtgggggaaaaggtgtagctcagggttagcccttcccccatcagggaaggcccctaagggctgaaaggccagggctgctgggggagttgaaggtaccttggacccctgctcgggagccctgctgccactgggcctcaccagtcggacgggcaggcccaaagcttccagctctgcagccggaggtcagttttattcgctggggtttagcggtttcttcctgtgtgctgttgcactttgcttcactttgttgcactctggctctgtgcggatgctgttttaccacgaagcgaaggtgtgtggaaacactgcttggagaaagttggtcggtgccatttttccagcagtgggggctcacttcatgtctctgtgtcacattttggtaattttgtgatatttcaaagtttattatacctgtgagggtgatttgtgatcatctttgctgttgctatcgtgattgttctggggtgccgtgatccgtgcccatgtaagacagcgagcttaatcggtaagcactgtgtgtgctgtgcctgctccaccgaccggctgttccccacccccccacgtctctcttcctctacttgggtctccctattccctgacacaaacaatgctgaaattaggccagttaataatggcctacagtggccactacgtgttcatgtgaaaggaagagtcacacaactctcacctgaaatcagaagctagaagggactcagcttagtgaggaaggcatgtcaaaagctgaaataggccaaaagccaggtctctgccaccaaacaggcaagttgtgaatgcaaagaaaaagcttttgaaggaaattaaaagtgctactccagtgaacacacaaattacaagaaagccaaaatagccttattgcagatacggataaaagtttgagtgatccagatagaagatcaaaccagccacaacattcctttaagcaagtcaaagcctaatgcacagcaaggccctacctgtcctctgttctgtgagggctgaggtgaggaagctgcaggaaagaagttggaagctagcagaggttggttcatgaagtttaaggaaagaagccatctctacaacataaaagtgcaaagcgaagcagcaagtgctatggagaagctgcaggaagttatccagaagatctagctgagatcattgatgaagctgactacactaaacacaaaatttcaatggagacaaaacagccttctattggaaaaagatggccaggcgcagtggctcatgcctgtaatcccaacactttgggaagccaaggtaggcagatcatttgaggccaggagcttgagaccagcctggccaatatggtgaaaccccgtctctactaaaagtacaaaaattagccaggcatggtggcacattcctgtaatgccagctactcaggaggctgaggtggaagaattgctggaacctgggaagcagaggttgcagtgagctgagatcgtgccagtacactccagcctgggcaacagagcaagactctatctaaaaataaataaattaaaaaaaaagaaaaagatgccatcgaggacttacatagctagagaaaagtcagtgtctggcttcaaacaacaggctgactctcttattaggggctaatgcagctggggccattaagttgaagccagtgctaattcactgttctgaaaatcctaatgcccttcacaatgatgcccaagctactctgcctgtgctctataagtggaacagcaaagtctggacgacagcacatctgtttacagcatggtttcctgaatctttccagcccattgttgaacccactaaggttcctttcaaaatatttctgctgttggacaacgtacctggtcacccatgagctccaatggagacgcataaggagatgctgtcttcatgcctgctaacaccacatctcttcttcagcctacgggagtaactttaactttcaagtcttaccatttaagaaatatattttataaggctctagctgccaaagatagtgattcctgtaatggatctgggaaaagccaataaaaagctttctgggaaggagtcgccattctagttgtcatttcatgattcattcaatgagggcaaagtgtcgacattaacaggagtctgacagaagtttagtatcaagcctcatggatgactttgaagggttcgagactttggtggaagaagttactgcagatgcagtaaagatagcaagaggattcgaaatgaaagcagagcctgaaatgggactgaattgccgcaatgttgccatcaatcttgaatgaatgaggagctgctgcttgtggatgagcaaagcaagtggtttcttttcttttttttgagacaatgtctcactcttgtcccccaggctggagtgctatggcatgatcttggctcactgcaacctccacctcctgggttcaagcaattctcctgcctcgggcccccctaccaagtagctgggattacaggcgcctaccaccacgcccagctaatttttgtatttttagtagagaaggagtttcatcattgttggccaggctggtctagaactcctgacctcaggtgatccacccgcctcagcctcccaaagtgctgggattacaggtgtgagccaccatgcccggccagcaagtggtttcttgagatggaatctacttctggtgaggatgctgtaaagactgttgaaatgacaacaaaggatttagaatatgacatcaacttagttgataaaacgctgggagcatttgtgaggattgactccggttttgaaagaaggtctgttgtgggtaaaatgctatcaaacagtatcacatgctacagagacatcttgtgaaaggaagagtccatcgatacggcaagcttcactgttgtgttaggaattggcaacggccaccccgttttcagcagctgccactgtgcctggtcagcagccatccacatcgaggcagactgtctgccagcaaaaagatgaagactcactgaaggctcagatgattgttagcattttttagcagtaaagtgtttttaaattaagggatgcacgttgttgctttagacagaatgcttgtgcacactgatagactacagcacacatgagtagactgcagcgcacaccaataaagtacacacttcgacgacagtacacacgaacagactacaactcacacgaatagagcacagtgcacgcttacagactacagcacacgctagtagactacgccgtactgtttacagtatggtgtaaacacagctcggctgcttatggggaagctggaatgtgtgtgcctcactcagttgcagtgtaagcgttatctgcagcatctccgcgggattcctgtagccccttattttccatttttctagcaacagtgttacatgggtgcactgtcatggtggttaattcctgttgggcacttagcttgcttctggtattttgatgtcacactgaggcggaataatcctctcatcatatcatcctggaagcagaattgatgtatccaaagcccatttttaaggcttttaatgcatttcactagagttcctccagggacaacgtcatttctttttctttttttttttgagacagagtcttgctctgtcacctaggctggagtgcagtggtgcggtcccagctcactgcaacctctgcctcccaggttcaagcgattctcctgcgtcagcctcttgagtagctggtattacaggcgcccaccaccacgcctggctaattttttgggtttttttgtttgtttgtttgttttgaggcagagtcttgccctgtcgcccaggctggagtgcagtggtgcaaccttggctcactgcaagctacacctcccgggtttacgccattctcctgcctcagcctcctgaatagccgggactacaggcgcccgccaccacacccggctaattttttgtatttttagtaaagacggggtttcaccgtgttagtgaggatggtctcaatctcctgacctcgtgatccgcccgccttggcctctcaaagtgccgggattacaggtgtgagccaccgcgcctgtccaattttttgttttttgtttttatagtagagacggggtttcaccatgttgaccaggcaggtctcgtactcctgaccttatgatatgcccgccttggcctcccaaagcactaggattataggcgtgagccaccgtgcccggccaacaatgtcatttctttttcaggagtggggggtatccacagatgagctctggcttgtggggtccagtaagattggaggcgctacttggggagggtgagccgctggtcccaggccaggcctggcctgtctccctcatgtgacttgaggaccaacagcacactgtggtttttgtctttatcagcaacaaatctgacacgctgcccctggccactcggtacaacgtcaagtgcgtggggctgtccccggatggccgcctcgctatcatcgtcgatgaaggtacttgcccttgatgtgggcgggtactgaggggaccagtgaggaggactcagggctgtgtgggtctgaaatgatccgctccccagtcgcctccgtgttggggcccgggtggggattggggatgagggtgtcatgggcgaggctgcgtccccgccgcaggctgtgtctgtggcatcacctgtggcagggcagggcctcatggcccttgggcattctcagtcctgactcctcacagtggacgcgagaaagacctttctccgtttttcccgtgctatgtatctggggtggcccctggggtagctgcgcggtggtgacctctggcgtcctgcagggggcgatgcgctgctggtcagcctggtctgcaggtctgtgctgcaccacttccacttcaagggctctgtgcacagtgtgtccttctcccctgatggcaggtaagggggacagcttgggggcaggagggttcggccgtgcatgccgacggtgaggcccactgcccagctcgtttccctgggccccgggttgtgacgttgggttgggcacacggcccaagctctggcattggtgacccccttttctggaggagaaggcttggtgcggccaggctgccctccctccagggctgtttcttccctgacttttgcttcctctgctccttggcctccatcctgcaggaggcgggactccagaaggcccaggtgggtgcaggctgagactccacagtggccttagggccattgctggtcttgaatatcaactatgtccgcgttccttccataggaagtttgttgtcacaaagggtaacattgcccagatgtatcatgcccctgggaagaagcgggagttcaacgccttcgttctggacaagacctattttgggccctacgatgagaccacctgcatcgactggacggatgactccaggtgcggcctcagaggcttcgggggagcggggcttgagagaggccccttggacaggtcacccccttgggccctgcagcttcgttccgcaatggcatctcggcctcctttggggctgggcgctgcccacaccatcaggactggctgggtggctgtggtcgagtctttgcggctctgaagtgtgtgctgtggccgagcctcctgcccctgcactgccctttcacctgtttgtcccagaaactgggaatgctgtggttggctcgggcagcgtctgggaggagttaggaaggcagacagggcagggacagcgtctgggaggtgtgaggaaggcagacagggcaggggctgtgccggggtgtcttcctgtgcctggaggcgtctcagctcactctgagaccacgtggggctgtagcggtctccgtgcagccctctggagcttgcacctggctgctttgttatggccaagccctgaggaggtgccatctccctcttttccaggtgctttgtggttgggagcaaagacatgtccacctgggtgttcggagccgagcgctgggacaacctcatctactatgcactggggggacataaggatgccatcgtggcctgcttctttgaatccaacagcctggacgtatgtccctttgccaagttccctagcctgatggtggccaaaagcggctagttcagggaggccccaggctgcaggcggcctcttcctgcggttcccccaggctgttcccgtgtggcctgggggcatctagggaccgatggcagctgtggcggcccatcgagaattgttctcagagttcagaggggccgtcggtgccactggtccctggatctgagctggagggaggtgccgggttgtggcagctgggccagtgtggctggggctggggtgaccctgtgcttccccttgcagctgtactcactcagccaggacggagtgctgtgcatgtggcagtgtgacacgccccccgagggcttgcggctgaagccccctgcgggctggaaagcagacctgttgcagcgggaggaggaagaggaggaggaggaggaccaggagggcgacagagagaccaccatccggggaaaagccactccggccgaggaggagaagacaggaaaagtgaagtactcacggctggccaagtaggtctctgaggtgtggtgggctgtggcggggcactcctgtgggaatctcttgcccccagagggatctggatgtggggtccccagggccgaggagtgggaggtacagagagcaggcctgcgtctcagggccccggtttgagcaccctcgagtgcttgggtgttgaccctgccccttaagcagggtccctgcctcggctgtctgagctgcctgtgtgcccagggcagggcagagggcggtgggtaggggtgcatagggggcagggaggtgtgcgggcactccgtgacgggaatagcagcaccttgggccctaagggggttgggagttgtctgtggccccaccagcttctgtggagtttggtgtgggcgatagtcccttggcctcgtgcagggagatgccgggagagcatttggcaagggtggagggagggaccgggctgtgagtgggcgcagcgagtggtctgagtcctgcttcggggcccgctggtgggtggtacttggtgctttttcaggcactgagctgggccgtgcagccccgcatccggactcagtcccccagacgagacgagatgagatgagactgagcccggccccacggactgcctgtgggatggccttagctgtgcctggagccctggcagagatgctgccctgattcggggtgtcccgcgtctgggctgtggggggaggctggtcaggatcacatgaaggcagagttgcccgcagctatggtgtctccgtcacccgggtgccccagcctgggcccctccttgctgcagttgcttagcgcctgctgtgtgcagggctctgaacttggcactgagacacactgcccacccttgtgaggcctcctctccgccggggaggagaggtgcagtgatgaggtggctgcgtgcggaggtgggcggcagttggggtccctgggtggggaaggcgcccacacaaggccctgcctgtggagggagccaggcggccagaacgggctgcctttggaggggttggggtctgctgggtaggtgggagttgtggccatgagagccctgggtctgaggagcagggagggccggctggactccagtgggaggagggtgctttgccaagggcagcggagttggagggtggccagaacaggtccaagtgggtcagtgcccacaagtgagtcagtgcccgcgggtgggtcagtgcccgtgagtccgtgcccgtcagtgcccgcggggacttgggggtgttgtgctggagtcaagacttgaatggggactggaggaagaggaagggatgatgggccccccaaccccgccctggggaagggaggttccaggcagctccaggaagacagtgtgcctgctaggcggggactgcgggctgtcagcgcgaaacatgtgaagggagggcctgctgcattggcagccagtgctccctgtcacttgttcaggagggacggggtccagaaaggagagggaaggaccagggctgagctacaacgtgacttggggaggttttgagggcgggggtgccatcagggtcaccttcgtctgctgatggggaccgagggttccttagaggaggaagcagcaggggatgatgggattcgggtgtgcctggcggccatgccgcgcctcccgcacctcctctgcctcccatgggcactgctgtctctgggtgcaccactagctctgctgtggggccagctggcgacagtggagatgctgtgtgaggttcctttggggtcccgagcttgggatggaggcgggcagcttcagggcctggggtggagagggagagggcaggtctgggacctcctgcctggatctgtggcctgtgtcctggagcccagagcaagctggggtggcagtctggctctgcgctcctcctcacaactcttctctctcgtcaattcaggtacttcttcaataaagaaggggattttaacaacctgacagctgcagcatttcataagaagtctcacctcttggtcactggctttgcttctggaatcttccatcttcatgagctgccagagtttaacctcatccactccctgaggtaagcctttgctcgcagtggggtgtggttttatgcactcactggccctgaatctgagggcccagccaagcctgcccttagcagtgggggcagcagagccacttggagcgccggctcaggccacaggacggcagcccgaaacctgcccggccgctggtgctggtcagtgcgacagtgttgccgcccccactggcagtcagcagcattggtctcgggtcagtcacagcctttcaagtttttgtctccgcttttcttcatctgtgagacacagagaacgaaaatactatgctcataaaattgtgaagttgcaagttgttgaaccctggcctcccctctgggccttctctgattcttttctttgagacagagtcctgctctgtcgcccaggctggagtgcggtggcgtaattcggttcactgcaacctccgcctcccgggctcaaatgatcctcccacttcagcctcctgaggagctggggccacaggtgtgcgccactacacccggctagtttttaaattttttgtcgagacgggtcttgctgggttttcccagcctggtcttgaactcctgggttcaagcaatccttgcctccgcctcccaatgtgctgggatgacaggcgtgagccactgcacccagccctctgatacttgaactgaagtgaattgttggagtctggtgagtgggtggggtaagctctgcacacagggatagaatctggtgtctggggctgccctgagtgggcactggggcttcagcccgggcaggctggcctcccacttacaggcccgttctctgcagcatttcagatcagagcatcgcctcagtggccatcaatagctcgggggactggattgcttttggctgttcaggtttgtcccccgcctgggtggtagagatggactccccattagggaccagtgctgcccggctacaggcatacttgacagccacccactgggggtgccctcccctcccccagttgtcttccatggggtgccctctcccccagccgcctttcagaaggggccctcccctcccccagctgtctgccatggggtgccctcccctcctccagccacctttcagggggtgccttcttctcttccagctgcctcccaggggtgcccttcctgctctggccctcctcaagcacctctctgtcttaagccccttgctcaggggtcgggggtcatagcctgcctcagttgtgacctgcaaccactgggttgcacgggcggggcccatcactggctggtgaagctgcagcatcgggcagtggtcccagcctatgcttgggggtttgtgcgtttcaccccctgcccggcagctttctcagtcctgtgccaagtgggaaggtgggccgggccagtctgacctggggtgggcctgagccgggtaccccagcttcccccgtgtgcacaggcctgggccagctgctggtgtgggagtggcagagtgagtcctacgtgctcaagcagcagggccacttcaacagcatggtggccctggcctactcgcccgacggacagtacatcgtgactggcggggacgacggcaaggtaggctcctgtccccgtcccgttggcctctgtgcctggggggctgtgaagatgcagtggtctgtggggccgtgtcttgacggtagggctggtgttcacagcttcacccgggctcatgagctcagtaggcgtttaaaaacatacaaaaatgtgaatggagagggttgggtgtccctctttcccctttctgacttggtctcctgcacggtggtggctgcgtggcggggagagggtctgtggtgccggcagccggcatccagccagtgtccaaggggctccagtacgtggccgagggtgggtccatggtactggcagctggcatccggccagcatccacagggttctggtgtgtgcagtgcccctgcgggccatctaggccttaaatgggctcctcctggaggtgacaggaagagactggggcagacggcccactcaccacccactcagcacagcctcaggcctgttggggaggctgagtgagccagggcagccgtgggcacaggggcaaggctctcaggatgtggcgtcacatgcgggggtctcagggatggggtgtcagttgcaggtgggggtctcagggatggggtatcagtcacagttgggggtctcagggatggggtttcagtcatgtgcggggatctcggatggagtgtcagtcacagttgggggtctcagggatggggtattactcacgggtagggtctcagggatggggcagtacaggggcaagcatcttaggtggggcggcatggggacagggatcctggccgaagccgtggcacacagggttggggtctgcccccgcccctcctgtcctgcctcaggtcaaggtgtggaacaccctcagcggcttctgcttcgtcacttttacggagcactccagcggggtgaccggtgtgacctttactgccaccggctacgttgtggtgacctcatccatggacgggaccgtgcgagcctttgaccttcacaggtgatgtttttgctccggattggcttggggcaggcttcccccacgcagaggtgaaggtggagggtgaggctgcagtgcagctgctggggcaggggaccctggcacgtgactctgaccttgcctcttctctgcaggtaccgaaacttccgcaccttcacctctccacgccccacccagttctcctgtgtggcggtggatgcgagcggtgagatcgtctctgcaggggcgcaggactcctttgagattttcgtgtggtccatgcagacaggcaggctccttgatgtaagcaccctgaggggctgggctggggctcaggaggggccctcctgtctcctgggagaggagcgcagggagctgaggttacactccgagggcccatgcccctggcccagagctgcccagagagccgcctcggccgccacctccactcttcacgcctccttgctctacggtaggttttgtctggacacgaagggcccatcagtggtctgtgttttaacccaatgaagtccgtcctggccagtgcctcctgggacaagacagtgcgcctatgggacatgtttgacagctggaggaccaaggagacgctggccctgacctctgatggtgagcacgaggcagcaggcaggagcagcggcctggggaccagcagcatgctgtcacacccactgccctgttcctcgttgtgggtttggtgtgaaccttctggtgggaagcagggggtggcttttatccagacctgctggtgtggcagcccttgaggttggcagtacctaggagacagcagattggcgagtcaggccagcgtggcttccacaagtccttgtggggctcccgctctgtgggcaagtacgccaggcaggagagaacagctccccgagggtgaagggctgctgccgcagctgcttcctgattttcggagttgctttggagctctgccagggctgtgtcactgggagaaggacacagggaccatggggggcccagacgctggatgcggccagtcccggaatctgcagactgggagaaggatgagggggccataggtgggcccggaagccagatgcggctgcccagggatctgcagactggcctcaggccactgcctgtctttctgacggggctgtactagaggcagccgtggcctcctgtgttcatatggtctgtggctgtcaatgcctcagcggcggtgttgaaagaccacgtggctcacaaagacccagcccatccatgtccgggtgtggacagactctgccatcccaggaggctggttctctctgcttcccgctgcctcaccccacccccaggcctggcattggccaggcttttggcatcacatgtggcttctttgcagaggctctgtattctagtctgtccagccgccctcagtaaccaccatcactcacccatcagcctcaccttcccagcgccccctccatcggcctttgtgggtcctgtggccccagctggaccgcctggtgctcttcactggcgctgagttgttcctcacctgtctgggttggagcttctcctgggaggagattcttgtgtaccagaccaaacaggcgctggtctcttaggggtgccagggcacggcctggtctccagccaagggtggttggtggcctgcctgcgggagactggggtcttcgttgggccttactttgcatctctgtttagctctggctgtgacttttcgccctgatggtgcggagctggctgtggccacactgaactcacagatcaccttctgggaccctgagaacgcggtgcagacgggctccattgagggcaggcatgacctcaagactggcaggaaggagctggacaagattacagccaagcacgcggccaaggggaagtgagtgtcagcatcgggcctcctgatttgagaccccagccagccaccaggctcctgcagcttctccatttttggccttgttctttgttcctgagaccgctgagtccctgtgggtggaggcaggtggtcctgagccctctggggagagtccatgtcctccttaactcctgggatcgcacagcccccagcacaggaggacgtctggatttactgaacataaacttgttcagctgagagcttgcatccacttccaaaccttgatcctgaattatgacatcgtcctggtgtgcagaggggagagcagccgggtgcccgagctcacactggagacctggcacttggggaggctgaggcgggtggtttgcttgagcccagaagtttgagaccagcctgggctacgtggcaaaatgccatctctacaaaaagtagaaaaattagccaggtgtggtggcacatgtctgtggtcctagctagtcgggaagctgaggcaggaggatcgcttgaacccgggaggtcaaggctgtagtgaggatggcgtcatgccattgcactccagcctgggtgctagagcaagaccctgtctcaaaaacaaaacaaacaaaagcagaaaacagccctggcagcctcctaagagtaaaaatgcaggtcctcagtcacctcacttgactagagagtgctacgtggatggtgaagacatagtgtccccttgtctcaaggagtcgggccagcacagcactgaccaaattgcctgcgcggggtcctggctgggctgtgaggctcaactgggtgggggtcaggcttaggagaagggggaggatctgtgggatgtgcccggggtgggtggccttgggggctggacctgtgtcccaggagctcagaacctgttcagcagaaggtcttcctccagaaagaagtagcgaccctgtcttggaagtggtatgaatgcctgtgtgcagtcctcatgggttcgccctgagtgtggaactgctgggtgctggtggttctgtttccagcttggaggagctgcacggttgccattcccacgaggaacgctgtcggcttctggcttctccacctcctcgccagcacttgttgctttattattattatttttttaatgagagctgttggggtggatgtgaattcgtatctcattgtagttgtgattgtggtttctctagtgacattcagcattttctgtctgcggcttggccgtttgtaagtcttctttggagaagtgtctgttcaggtctcttgcctgtttttgaattgggttgtttggattttggttgtggattttaggggtttctctgatacctgatgtgcagatatttgttccgctttgtgaactgtctttccaccgttttggtggcactcttagttctgatgatgtccactttgctcattttttctgttgttctttgttctctactgtcataactaagggaccttgcccaccccgaggcgtctgttgagcggggtggtaagggctggtttctggtttctgcaggactaagcagacgtgactgagagtaggctgcttagggtggaggccgactggtcgccgttttgtgctgacctcagcagggaacactgttccttgagccacttgttccttttgtgaaaaagacattgattctcaggaagcggaagcatctaagggtggtgctggctcagagcggaaccaggtgatggcaccattggacattgtgggttttaaaagtctcgcgtgagttgaggcagcgagccttggcgaaagttgctgaggctggtgtttgcttcctggagggctggtataggatctcctctatttcctaaggttagtttttattttatttatttttatttttatttttatttttgatttttgacacggtctcgctcttgtcacccaggctagagtacaggagtgcaatcatggctcactgcagcctccaacccctgggctcaagtgatcctcccacatcagcctcctgagtagctgggactacaggcatgtgccaccgcaccctgttaattttattttttgtagaaacagggtcttggtatattgtccaagcttgtcttgaactcctggactcaagcaatcttcccaactcagcctcccaaagtgctgagataacaggcgggagccaccatgcaggcctaaagttggtttttaggagccatacgctgaggtttccgtggtggccaccgtaagtccatgtctcctctccacccagggccttcaccgccctgtgctactctgcagacggccacagcatcctggcgggaggcatgtccaagttcgtgtgcatctaccacgtccgtgagcagattctcatgaagaggttcgagatctcttgcaacctgtctttggacgccatggaggtgagccgccagcgcggggccggatggatgttgcttccaatgcaggtggaatgcgtcgggctcctgcgttctgcactcctggctccatggggccttgggcacagttgtggtgcttgtcctgtatctaagtgcacgggcccctcacctgccccagcagagtccggccgtgaagccagcacctgcctcagctgtgtgtggagccacggtccccaacccttttggcatttgggaccggtttcgtggaaggcaatttttccacagacagggttggggggattgattttgggatgaaactgtttcacctcagatcaagatcaccaggcattagattctcagaaggagggtgcaacctagatccctcacgtgtcgttcacaatagggttcgcactcctgtgagaatctaatgctgccactgatctgtcaggaggcggagctcaggtggtgatgcgagcaatggggagcggctgtaaattcagatgaagcttcactcattcacctgcccaccactcacctcctgccgtgcagcctgtttcctaacagaccatgggccagtaccaggggttgggaaccactgctgtggatgaccctgccgaggctggttgctaggaggctggagctgtgaggggcagtgcccagcacacgctggctcaggagacacggacatctgtcagggaaggagtgaacgaagagggtgctggtaggccctgcccgatggcttcctgcccggggtcctgtgtacaaggctctgccttcactgtccccactggtgcctgcccttccccctcagcacagccctcggctcaggtcccactcacatgctggctcctgcaggacctcagaatgagagtgaggaagccctggtagcctctaagcaggggtgtggctgctgggttcacctgtccacgccccatcggggcagaagcccactgtcccctaaatgtttctgggggaaagtgtccttggcattttcacaagggagtagacggccatcctcgctgtgagccccagcctttgtgatggtggcagcaatgccagcatgtagacctcagtccatccccctccgcagcctccgcacctgccctgctccacagcttccacacccaccctgtctgcagctagctctgcaggaagagtccctggggcactgcagggctctctccccgtccttgttctagacagggctgaggcttgtctggtgttggggtcaaagagcaagggtaggagacgagggccaggcggccaggccatcagaagcaaggcgtccactgcttttgctgttctaggaatttttgaaccgaagaaaaatgacagagtttggcaacctggcactaattgatcaggatgctgggcaggaggatggagtcgcgataccactgccaggcgtcaggaaaggtgagcagaggttcctcccgcatctgcccaccactcaccggtcctgggtgaccacgcattcatgcccctggttggggctgcagtgtgtggaaataacagttactacatggtgacatttgctggacactgggggtgtcaaaggcccagtgggttggtgctggtgccgtcagcccctgggcaggagaagctgcccatgtgttgctacacgtggcctccctgccctggcgggacccgtccatttgctcttgggactgggtgccccgtctgctgcacagcacacggagcattctggcgtgaggccatgtgcgccgcacagagagccaggtgctctagaagatctgggtcccaggtagaccatcctgatgggacactcgccagccagaaaccctgagtgcttccatatgcaggcccagggtaccgtgttgagcacagcagacccactcctgggctgggctggggcccttttctgggttggacacacagtctgctggccgggctggcttttttgagcatctgccccatgggctgggccatctgtttggcagctcacccggaacagcctccgcggccccagcacgggcccacctgccgcagctgcagcgagggaagggctgcttctgcctccgctttgtgcaggacccaatgagtagaggctgctgctcttgatggggctcccacagcaccccccagccagccgggagaccgcaggatgacttgcttcgtggggagagcagcctggatatgctgtccagtgatcattaacggttcttttttccccaggtgacatgagttctcggcacttcaaacctgagatcagggtgacctcactccgcttctctcccactggtgagcactgagccatgggcttttggtgccggtgggcactggggcatctgtgccatagcaaggctggccaccatggagctgtctgcaggctctgggctgtgccctgtgcccctgggtaagaacatggccctgcaaaccctgcaggccacaagatggctgttgtccctgaggatggatggctgtcacggtgccaacctcagatgcactgagctttgaaacatggcaggcctggtatgcccttgctctagcagctccccgagtgccctggacgtgctgcctgggggcggctctgccatcacggagagcccgtctcctgcgcactgcccccatcctctcgcagtggggaggagggtctgtgccacaggcctgtggagcctggcggtgcacatggtccccacacagaggagccaggagcagggctattggcaagcgtgctccagcctagactgagtgtcagagccaggggcagagaggcccatgtgagccaggggtctgtgccctcgggcccaagggccaaatctggctggccacctgctttggtcactgatgttttactgggacattttactgggcgtttttttgttggcggatccttctggctgtctctagtgatccgtgcagcactgagtaggtgcagcagagaccacagggcctgcggagctgaagacgcctgagctagacagaagacttggctggctcccggcgtcaagagaggaggacgcatgcgtgtacatatttgcttatatgtgcatccctgggagagtaacttctgggatgatccattcattccttcccaggggagtagtggggtgggggctagaggcagacgtcccggttcctcctgatttttgcactttgtcccaggggaatgtacttaatactgtttctttaaaaaaaaaaaaaaagaaaaaaaatgttgggaggaatgagcttaaatttttaggaaagcactgcttaatttcccagggcgctgctgggcggccaccaccacggagggactcctcatctactccctggacacccgcgtgctctttgacccgtttgagctggacaccagcgtcacccccgggagggtgcgcgaggcactgcgccagcaggacttcaccagggccatcctcatggccctccggctcaacgagagcaaactggtgcaggaggccctggaggcggtgcccaggggcgagagtgagttggggcttcggtgtcgggcgccggggtcatcctctcttcccctggtttgagttggtggcagaataagcatgattttttctccttttgcagttgaagtggtcacctcctcccttcctgaactgtatgtggagaaagtgctggagtttttagcttcctcctttgaagtgtctcgccacctggaattctacctcctctggactcacaaactgctcatgttgcacggacagaagctgaagtccaggtagagggtctcccccgcagttcatcggtggctcaggtcactggaccagcttgtcctgctggataaaagggaactttgacatgccaatgcagcatgaagtgagcccactgtaccacggggtgagccccgcacgcttagggagtctccctttcagagccgggacgctgctgcctgtcattcagttcctccagaagagcatccagcggcacctggacgacctgtcgaaactgtacgtgtgggtgcagggcctgggggtgggtggggtgcacggtcccctgctggtccacactgtggagtgctccttgtgtcatctgatttgaggacaaaaggaaccagtgctggaggcttgtcttctcacctgcgggtgaactgcacctgcccggccaccccgtggttgagcagcttgggaaatggcctggcgctgaatggaaagcagtgagcactgtggcaggcagacaggctgcaggtggcgcgctccaggtgcggccggaatcctccaggctcttggagggattgccgcattcgtaggaccaggcagcctttcctgaatttgcaggtcacttgcacaggcagtgggggtggtcacaggactgtgaggccaggcagcctggagtcctggaggtgtggctgccctgagctgtggctcccctagaaaagggtgctgttgctgctgctgcgaggattcatccgcgggcctaggacagggcctggccctccgcagtgctcactctgcaggggtgcccgcctcttctcctgtcatttctttgtggtttgtgccttttttgtccctaccaattcaccttccctaaaggtcctgcagagccgggactaggcaggcctcagagtagccatgtgagggatatcaccctctgttgccaatcagttgccgggtttcccagctgcgtttctgaacggtctgttctctgtcctgtttgcgagttgctctgtccagggttcaggggcagagcctgagtttgggccttgtgggttcatgtggtcctcctgtctgtccttgaagtgtcactcagtctttggaaagagtcctggagtccaggtcgagcctgtcctcccctcgtgttctgggtgccctacagaaggctgggatgtgccctgatccacagttttggtgccaggccttccctcggctgagatgtcctggacttttcacagagctctgtaggggaggagggttgtctagctcccttatttatgtatttatttattttttaattcattattattattattattatttgagatgaagtctcgctctgttgcttaggctggagtgcagtggcgtgatctcggcacattgcaacctctgcctcccaggttcaagcaattctcctgcctcagcctcccaagtagctgtggttacaggcacacgccaccacccccagctaatttttgtatttttagtagagacagggtttcaccttgttggccaggctggtctgaaactcctgacctcaggtgatctgcctgcctctgcctctcaaacaaagtgctgggattataggtatgagccaccatacccggcccagctcctttagatttattccctcttatgggatgtttttagagttcacgtaagtgcattgttccttggacctcctgtctaggcgttcactgccaatctgtagggttgccattggctgtcaggaagagtcctgcacagagggtcctgtgccctgcagatgcgatggggcgcttccttcctttctcatccatttatctttcagttctcctttcctatgtaaagtgatggtggcatcacttttctcctttattccattaactcagaaaattaactgattcagagcgtgccttcctcccctctcgctccacaacaccacatagctctgcagcggtctcttcctaagtgtttggtggaacttgctggtgaagccatctagattgggcccagcggaagggctgagctgccaggatgaccccaaagggatgggatgttacagttgggtccttgggtccttgaaggcctttgctgccccagggctggatggggcagaaccagattgttggggcagggaaaagaggaaaaaaatggctgctggggtggaggaaccggcatgtccagcccctgctgcttttctcaggggtcacagaggaggtggttgggtgcaggacaggccagggcctgggcgttgctggcattgaccatccctgtgtgattgacagctgtagctggaaccactataacatgcagtacgcactagcagtttccaagcagcggggcacaaaacgctccctagacccgctgggaagtgaggaggaggcagaagcatctgaagatgacagcctgcatctgcttggaggaggaggcagagactcagaagaagagatgctggcctagagccagccggttgcagcgttggattgtgccggctaagacctgccagggagatgggacccttgtgccacctgggccagcaaagaggaggggtccagagaacagctgaaatactgtcactagtggtagtgacttgcttttcctgtgcacacatgtagcccatcaggacagcgagccgacgggtcacgccaggggccggcacgcactggcacctggccccaggagcggggccgtgtgaacggtgatgaatgttgaaaatgcgtctcagagaggtattcacatgaactttgtatgagacttatttatatctttaacataaaggtttgataaagaacttagggattaaaaaaaagatggagttttctaacgtgaggatgaagtctacacttcagattaaaaagggttatgttgtatcctgctgtcttgtgggggctcaagacctgcctgccttaccaccagggcctccgtcctggggaagcaggctgacagagcagggtgctcctgctgtctagcgggggctctgccttgtgacctgtgcatatccttggggtcaggggcacagagcctctccctgacctcttggggatgctttggagtctggggctgggattggcctgtcttggtgagctcactcagacctgcaccagctctgcgtgggccacacggaggaggagacagctcctcccctctgcagtgcccttgggaatagtcatcatgagagaggcttgggtctccatcatggtagggcatcctggtccccacagctcagtaacagcagcctccagggtcaggacctgaggctgacactgaggtgggcacttcaccgactgccagtgctgtctgccaggcccagcctgtccctcgccagcggtgtggcccccaagaccctgggtagtacctggctcccttgcttatctgggaagtggagctgatatctgcctgccggcctcccgggggtggcgtgaggccagatgtgctagagagtggagatgaatacgacaggcagtgccttgtggcccacagcactgtacctgcaggcctgcagaccagaggtctttgtagaagggaggagctcaggccctgatgacaccaggtgttctgtggctgcacaatctccgtgacccagacgagagagaatccttagctatcgcctacccaaagcacaagttccagtgttcccctcccttgcctcgcccttttccgtgaaacaatttccagcgttccccctcctcgcctcacccttttctgtgtcacatgtgcatggcgatggacacctgagtagtcgcccctgggacaactggagctgcggctctgcagtggggtctgggagctcccggccaggggcagctcccgcacacttggtagagacagggtcctggcccccacaccgactgagtgagagtctgcattcggcatttcctttctgagtggcgcttggtgtttttttgtgccatcccacaaccccatcgctcccaccagctgatgctccctggctggccgctccccaggagctgagaagcctgaagagggccaggcacggaggagcaggaacgaggacagtcaaatgtgccaagcttgtctttggttgtaactggtaatgtcccatgtctgttattctagttccccactatcttgcaaggattggcagtaaagtcctagtgatggacaacgcggcagtggggaaagtgacagccgtggctagatcatcagatgtgtctgtagaatccggtgtgtccctgtgaacatccgccagcagtaaccattcacattatttcaaaaacctgcattattaggttgaaaatgggtaaatcggggaaaaagccagcacttatccagctattcctctgtgaactaacccatgcataacaaacagatttttttaatggaagaattccagctaggacccgagcagctgggatcttcacactgaccgtccatgctgtgaacgtaaaaaacaaaaacaaaaaaacaaacccaaacagcgcccgggaatggtggctcacgcctgtaatcccagcactttgggagtccgaggcgggcagatcacctgagctcgggagttcaagaccagccagaccaacatggagaaaccccgtctctactaaaaatacaaaattagcctggcgtggtggcgcatgcctgtagtcccagctacttgggaggctgaggcagaagagtcgcttgaacctgggaggcggaggttgcgttgagccgacttcgcgccattgcactccagcccgggcaacaagagggaaactccgtctcaaaaaaaaaaaaaaaaaaacccaaacagaatcggcggctcacttgcccccagactaacccagatcaagcccctgggtggaactgcagtttccaggatacaacatcccggggtcagtaaaacccggaggggtcgctccgtgggagccggagccgcgaggagacagtcatggaagcggaggggtagtcctgaccccgcgtgggtcctgacgccgagattaagacgagtggccatttaggaggatgtggaccctggacgctcgtggtgagttaaggatgagacggaggtaaggtaagaagcgccggactgagccgccccgaggcagccttgctctgcggatggcggaaagggtgcgccgcctgtggaggcgtccgatgggggcggggctggggaccccgggagtcaccagcatccctcagcctcgagcacgagccctcagccaccaccggaaggaagacagggttcccggaactctattcggaggctctgcgcaggcgcggcccccgcccaccggcgaactcactggatagggctgagacgggggcgggtcttggctccgcccagaaggctgcgcaggcgcagtcccgacgagcaacgcgtttgtagaggggtgggtgcgcacgctctgtccctgcgtgaccttccgaccccgctgtcctcaccgcaatggcggctgtgagggtcctggtggcctcgaggctcgctgcggcatctgcattcacgtccctgtcccccggcggtcggacgccttcccagcgcgcagcccttcacctctccgtgccgcgccccgcggccagggtcgcgctggtgagtggacggagggggtgaggtcagctcccgcctccagagatcagccttcgctgttctctgcccaaggtcggcccctcttcctaggtccgctcccgccgccccacgtcggctccttcaccccaagtcagctcctgcggcccaggtcggccccattttcccgggtcagcgcccgcggcccaggtcggcccctttccccccagtcaactcccgccgcccaggtcggcccctttcccccgggtcagctcccgctcctctcgcaggtgctgtctggatgcggagtctacgatgggaccgagatccacgaggcctcggcgtaagtcctcaggggcagctggtcctccaccccgggggcctcgagaaggcctctccaccagtgaagtttactcttttttgaacagcttagagaaagcatgtattttattttatttttactttttgtcttttgagacagcgcccagtctggagtgcaatggcgcgatcttggctcactgcggcctccgcctcctgggttcaagcgattctcctgcctcagccttccgagtagctgggactacaagcatgcaccaccacacccaactaatttgtgtatttttggtagatacggagtttcaccatgttggccaggctggtctcaaactcctgacctcaagtgatcctcccgctttggcctcccaaagtgctgggattacaggcatgagccactgcacccggccgagagagcttgtattttaaataccctattcttggctaaaaaaaagcaaaaacgacttgcaaaacccagggagacgctaagaaagaacagtttttaagtgtcgcttatgctgtcacctagagcctagaaatgacttagcatttcacttgagtgtttttcaggacacacacattttgaaaacactgagatcacactcacccgtgttttgcaaatgtttctgacgcatgggaagtaattcccattcattcagttctcaacatcattttaacagttgcgtggtatttctgggtcctagacaggttactgtttacgtaactggtcagctgttgctgagtgcttggtggcctgatttcctgtgctactggaaatgactgcaggccgaaccagtagggcaggaggccaccacgcgtgccaggtacctgtagttcccatgtggttcagggtgaactggagaggggagagctgggtggtggcgaaaggggtgtcaggccatggagagtggcctgaggctggtggctttgtgggtggcccaccttggctggttggagttggcactaggcagagtgagctgggggaaagggccaggatgtgtttcatgatttggccttggtgggatagaaaatagccccagaatagcttgagccctcccaggcagaacggcagggtcttgtgtctggggtgtctgggtggatttcttatgggtagcggaacccaagtgccagggccaggtgctgacctctccctctggcaagtcactgcacttcatgcctcggtttcctcctccacgtaaggggcagtgagggcttagtgtgtgggtgggcttagccacctatctcctgttggcactgggagttgcggatgccagcgtgagcccccataatgtcagctgttgtccccaggaggagcttctgttgcccttgcccttggggagatggagctgcctggcctgtggtgttgtcctggggtctcttgtgtctctcccaccatctgtgatgggaaagttgagggagactagaaattgaactaagtagtgaccgaaagccccgtcacaccgtctgtgcacgtggcactctgagcacactgctgcttctcactcttggtgcttgcagcaagcaactggaggagggcagccaggccctgggtgtaggtagagcactcagcagccggggacccgcacgcctccaggctgtgccctcagtggagtcacccggcccccataccccagtttgcaaagggagctgttgggaccagctgatctccatagcccacttctgagggtttgtcatagtcgtaacccaccaaccgacagtgaattggaatgggggtgtgggggacgtttggcttggtatggaaccaactgtaactttttgcagagcaagtaagatattaatatacattaggaatttgctcctggtacttagctaaaatcctgtttttaaaaatgtgttaacacaaatctgagtggggcacgttttgaagagttgtctctggttttcccccgtgcaggatcctggtgcacctgagccgtggaggggctgaagtccagatctttgctcctgacgtccctcagatgcacgtgattgaccacaccaaggggcagccgtccgaaggcgagagcaggtgtgggggtgggattggaacttgcttcttgtctacctcccacggtgcagcctttttttgctggcttagcttaaaccaagtcttgtgtgcaaatgaacgtccttctgagcagctgtgctcgggctgttccagaagtaatgctgccaaggctcaggagtgccttccttccagtactcacagaaggactgaaaatggcgaccggatcgcttcccactgagtcaggctgctcataccttggtcttaagcaaaggtggtggttctcagcttggtcgcccaccttcttcccctgtctgggctccagatctgttttgctggttcccagcagcatgtctgttactgcggtgtgtgtggttctggcctgtgtggcctgagatccccttcccttgcctgtcctgcctgacagccctgtgcaggccattccaaggtgccttccaactggcctcggaccacgagaggtcggagctggagattcgaggaagaagccatagctgcctcctggggctgtgcttctcaccagtggggacccctgtgatttcttttcctgcctgggaccctggcttctgcacctggacttgcaccttcggcccccacacctgggggctagcagcttcctgcggtggctggccttcgggttgcttcactggtcctgagtcctggcttcttaccttcccctctgagtcccaccgtcctgatgagtgcacagaattctgtctgctttagacactcggagagacttccatttcccatgggccttgactgcagaagattcagagtgatttggcgcaggttctgaagtgctgatcggaagagcccagcatagatttagcgttgctagaaccatgttgtctttccaggtagtgaccaaacatgctgacctggaagtaagtccccgtgtggctgagagccacgtgtgtggagcgtgttgcctgtgggctgtgcccctgccgcgctccacagtccttcacctgcatgctgaggctttttgccctgtgctctttcccaggaatgttttgaccgagtctgcgaggatcgcccgtggcaaaatcacagacctggccaacctcagtgcagccaaccatgatgctgccatctttccaggaggctttggagcggctaaaaacctgtgcgtatttgagctccaaggtcttccgctttccatgtggagcagatgggaagggggtgcacctgtctgctgtccaatgtggtcagtggagcggcgatgggagggggtggtgataggagcagtctctgggtttagggtctgggcagggcacgtgcctgccctctgacttgggagctgttcttagggttgggtcttaggtagcgttgtagcgagccatgcttttgtttctgcttctctgctgcctcttctctcagcattcctggtacccagcagcttgtcagagtgggtttggggctccctcttatctcatcactgtgctgtaggtctcgtcacgttgaaatcagtctctgagtatttactccttgcaagtgccagttttttttctctctctctctctttttttttttttttttctgtagagatgaggtcttggtctgttgcccaggcagggatgcagtggcacgatcctagttcactgcagccatgatctcctgggctcaagccatcctccagcctcatcctcctgagtagccgagactataggcgcatgtcaccatgcccatggttttgtttttttttttttttggccatgtatgtagcccaaattggtctggaacttctgggctcgagtaaccctcctgcctcccaaagtgctgggattccaggcctgagccaccgcgcctggccccaattctcttatggaaccttgcaggatcagaaatgggtttccttcttggtagtttgggcggcggtcctgacaggaagaagggaggccgccttggcgtggctgttttggtagctggaccgtgaatcatggaggcctggctggctcccacacggtggcgtccttgagttccagatcctctttctgttctctgtgtctcctctctctctttgcacattcatggaggttctctgggcaccgcccccatggccctgcctgagaggtggaggtggtgccaggctgaccctccagggacagctctgccacctgcaggagcactggccacagtgcatcggagcgtgcaggtggcttctgtgccatggtgtgggtggcagccccagcacggccggccccggtcggcagctcctgtttcaagggcaggttggaggctggctggccgcttgccccaccctgggcagcctgcacccagagtcgaggggtaggcagtctccatccgaagaatgcgcccctccttatcccgaaacctcagaggcctccttcctcagatgccagctgttttctcagtgcccttggccgtgccctcacccctctctcaccggaagccccaccccagcctgtcgtccccggtctcctgaaagccagcaagcctcgtcggtgccgcccacacccctgacctcacgcagccccacgtcaggctcgatcttttgtccagttgtccctgcgtcgctgccgtctccacgaggctctgaccactgacaccgtgtgtggcggggcgcaggggcagctggagggtgtgctgggggctccgtgccctggcatggctcctccacattttgccaacccagaggcacaggcgtgaggtgtgtggtggttctcagggtcagtgggtcttggccttggctttcaaggtgttgatgggccctgggactgatgtgcccgtgtgtctgagcccacgtcccctgggcgaagctcccattttcactgacctgtccagagcgttctgggtgagcctgccctgcgtgtccatggtgcggcgcgctctaatgagctgcagccgtggccactctgcaccctctgagacagtcacccatggggacggcgaacacccactgcctccagaagattcccagcactctgccagcaaagccatgtggaaaatgctggggcagaggactggggtgcgtgagggtggcgtagagcccaggggtgggttcgtgggaaggtgtgtccacttgtagatttggtggcattgccagatcacacgccccatgggcagtgtggagagacctcccctgccccgcgtgccctccacagctcctgctcctcggcctgaggtgtggatgctggtgtcgcaggtaaactggcgtttctttcacggtcatcgaagcaagagtgcttggtatgcctggaggccgactgcgtttctttttttgggaactcctggagtttcctgctgcccctttgttttaaggaaaaactctcacaccgtgtttctcctcctcccaccacaacagttgtccacacagaaggtgggtgtgaagggtcttccccatgcaccacgcaggggtcgctgctgccttctaattcagttccaacagtatggacccggggtagcgtccgatcgcacgggttgagggctccgtccccaaaactgccctctgacacataccggtaaactgtctgagcctctggaactgaccaattggcttcaagttggggttcccacaaccccgtttgctggcgtggctcacagtgctcagggaaacatgacgtcagcattctcccccggggagtgggggaccctctcaggagagggtcctgagacccacagtcagaaaggcggggaacattagagtcctgctttggggcaggtaaagggcaggcgggaaggtcagaggctgcccgaggcccgacacagccaacgtcgtaacagaaagctaacaagcagcacgggagttaggagccggaaaccagcgtctgagtctcagcaccgcagcccgggttctgccagctgctccggaaggttccagggcgtgggccctctcgccctggtggcctcctgctgcaccacttcctgatcctcctgcttcctatgcttatttctgtttaaaaaacaggaaaatatgttcacatcaaacgcgcatatgtgcagccatgcccatgtcccttgctgcagctgactgagggtctggagctgtgcctaggaagccccccaggaatagaccctggttgtgaggctgtctgaggaggccttttgtctcccggtaggagcacgtttgccgtggacgggaaagattgcaaggtgaataaagaagtggagcgtgtcctgaaggagttccaccaggccgggaagcccatcgggtgtgtacagccgtgcaggcctcggggagggagggaggagggtgcgtgggcccgcggcctctgttctcagccaggagctgccgctgatcctgaaaactcacagctgcttttcttgttttaactgaggggatttcacacgatgtcactggtgacttaacaggaaggagaggcacagtgcacttccctagaggaggcctggaattctcttggctcccagaggtgtccctaggcagtccctcaggacccctatcctttaccagaccccttctcccaagccccttagccacagtacccccaaccccgctgacttctggccagtcactgcagcacgtgctccatccctgacgccatccactcccagcggcctccctcctggggagccacagccaaccacgcccctttgtccctgctcagacaaagcctgggtcctgaggttggcggcacgagtagggcgcccactccttcatccacgtaagcgccttggcttacgtggcgggtcgcagccccgcagggagtgtgtgctcttcagcgtctgctgccgggaagtcactctcagatgtgtgagggtgacccagcaaggccgggttccgcctcggcaggtgtgatgcttccacgagcctcccggcacctgctccttggtggtcctggaacgcggcgctgtgctgtccaggtctcagctgcgtctggtgctggcagggcgagagccgcacttgcgtgggtgaacatcagtgaggcgcactcgcgatggccgctcactaccgagttctgtcagccgaacaaggatgaggatctatcggaatcctctgtctccccatccacagtcactcacttaaggacctgcctggtcactgtccagggaggcccctaaagtggagcctcaggaagaggtgcaggctcagagctcctgaaggaggtccctgctgcagccgtgtcacagccggggtgaaggtttcgcccatggtctccacctcgggatcccgtccttgtcagagaagtgttccttggatgagcgcccagagggaggagcccatggccctttcttctgtgactgattaaaaatctcgatgaaacaagacagcccctggcaggtgaaccactgcctctgagcatgcctcccctgaaaacagtgtggggcgcaagcccatctcctccccaatccagccatgaggctcccctggaaacagcacagggcgcaagcctgtctcctccccggtccagccatgaggctcccctgaaaactgcagggcacaagcccgtctgctccccggtccagccatggggcttccgtgcacggtgacccacaggcttttttcctgaggaaacctaaatcctttcccactggccccacccacccctcagcctggtgtcagaggcctgcgtggccagccaggggctgttaggcggcccagccgctcactgctgggaccccttccttgaatgcagtagtcgaggtgggcgctgggctgtgccaggagccactgtggcatctgtagctggcagttgatggctgggcggctgcacgcagcgtcgggagctgctgagaacctgcttcctggactttctgcctgcgcagagggcggcaggggggtttcatctcataggcagccagaagttgcttcaggacatgcagttttgggggcgggtttgttttgagagtatcgctctgttgcccaggctggagtgatcttggctcactgcaacctccgcctcccggggtcaagcaattctcctgcctcagcctcccaagtagctgggattacaggtgtctgccaccaggccgaacttttgtaattttaatagagacaagttttcgccatgttagtcaggctggtctcgaactcccgacctcaggtgttctgcctgcctcagctgcccaaagtgctgggattacaggcatgagccactgcacctggctgtgaaatgtgtttttaacagtgtttcgttacagctcacggtagcagtttccacctgggcctgtcgggagtgggtaggactgtagacagcgggaggagggatgaagggtgcggggtgttgagggcagggtggggcctgacagctgtgggctacaccacaggttgccaggggatggggctgctgttaatgaggccgtactccttccactgttgcccctgggtggccatgaggcgctggacgacacaggtcactgaaggccctgctgtgggcacagtgcctggcacacaggggcctctgttgacttggcagggaggggttcctgatgaagcagaagcaggtcccaggggtgggtgtggcaggaccctcagtttcagggctgctgcggcctgtgcgtcagggtcaggggcgtgcgtccaccagcctgcacttgttgagagttgtgctgcaggtcggaggctggcgaggctgctcctggcccgttgtgcctcctgtagaaggggggctggtgtgaatgagaagtgcagctgtgttatctattgctgggtcacagaccaccccacaactcagggctggggcagccgcacatcattaccctctctgtgagtggactttggcagcccgggactctcgccagtctggggtgtcctggggcttggggcttagcccatggctgttgggggttcccctcaggggtccttggcctggtgcttgagtgcctgcagggcgtgcttggcggggagtggggctgaggacacctcactctcagccttgagtcacctggtgccacctccatcacatcccatgggccacagccttctggcagcgcaggctcacagggggcagggtcggcagggctcccgtggcagggcagcctggggtcatggcgagggtaatttctgttctgcaggccatgcagcctgcctgacccgtgttcttttcgcctttcagcttgtgctgcattgcacctgtcctcgcggccaaggtgctcagaggcgtcgaggtgactgtgggccacgagcaggaggaaggtggcaagtggccttatgccgggaccgcagaggccatcaaggccctgggtgccaagcactgcgtgaaggaagtggtcatatccttcctggtagccaggcccggcccgctgtcgtgcttgtccctgagacgtgcatagggacgcccctccctccgggctgtcttggtgggtggcctcttcaccgggagctgcacctgctgctctccctgtggggcctcccccagtgggcaccgcagccatgtgtctaagggcagagagcagatggctgtgacagcccagctggtgtgaggtgggtcacagacacgtcagaagcgcagctctggtgcgtggttggcagatctggcagatccaggtcccttgcctgactgtttagtctgctcagcaacacccaggcagccacactccgggcccagcggggggagggtgaggaaagagtgtgtgcgaggtgtggagggagagcagccgggcgtgcaggaggcgggggcttcctgagatgctgggggaaagcggccgggtgtgcaggagaaggggcttcctggcttcatttgggcggaagttctcaggccagtttgggtggccaggtgattcagccagccttgcggcccccagcccctcctgttgaggtgtgtaccctgagttctgagatgatggaccaagaacaccagcggggctgttgcccagggagatttggagggaggctcctggaaggccctgcctggatctgggagaatgtccatgtgagcccaactgagagaacagaacactccggggtgccggaaggcactggaatgagtagagcatggacccggtcccctgcaggtgttgttctgaagggtgcagttcctctcaatggggcagcttttttctcacaggcagcttcagacgtcaggccccatctccctccctgcggctttcctgctgggcaggagcgcagtgcaaggctggccccaggcctctgactgcttgcaggaagataggggcacgtgtcttgggtggtgtggaggcctggccagtggttacatgcatggtgttggggaggctcaggtctgtggctggccggccccagttgtgccacctgctgccctgttgcctgttgccctgccccatgaggaccggctccttcacggccagttcttcatctgaaaagcggaggtgctgccactgcctcccgtggtggttgtgagcaccccaggcatgtgtgcgcccccatggcggggcagctcgtggccatgtgtgggtgttgggcctgtgtgatgctggcatgaaaggtgccccgttccctggaatttcccgctgctttcttcctctagaatgcatgtgaattgggaacaggttccttcttatgttgttcagcagcataaatcatacagaaagcagggtcctgccggcacagactgcaccaggagcgagttctcctcttccaagttatctgagaacaaagttaggacacgcggtgagggtgggggaggggccggggctccacacctgaaagtccctcaggtccgtgctgggtggctttttccgtaactctgcacacgaagctcacgtggaccagaaaaacaaggtggtcacgaccccagccttcatgtgcgagacggcactccactacatccatgatgggatcggagccatggtgaggaaggtgctggaactcactggaaagtgacgcgcatggacggggcccagctaggcgccaggacttggcctcaccctctggctgaggagctgtcggctgctttccatccagctgggagtctggcaggcccttttttttttttctttgccgaaacctgcaggcgttctctctctaaggaggatgtgctgcagtgcatgggggatgtttcttcctgggtgtggctgggctgctctcacatacagaggccgaggggccaattcgttctctgccacagggacttgcctcactgtgtcccaaaaacaaatcgcagccagcttttccagaaatagaaaattctgccgtctgaggttttatacttcaggttagttagtttttggaaggaagaacatttttaggtttgcaagcctcctgatcaggaaaccagaaataccacatttatggaccatgaaaggttggttcttgactctgaagggacttttgagttaatcagcgtaaggggatttctaaagcaggcaatccctgtagccgcagagaataaacgccttcccaaaatggcaacttcccacagccacatttcagacctgctgagactgctgagtgaggaatggcagtgaggtttcttcaattagtctcagttctcttaattttcaggaagaaagggaaattgcagcccctcagcccccaggattgacctctggggagtgatggtagcgttggtgccaggccgtgggttcaggtgtggcagaagcttgcagatgcgtccgaagggaaataaagtgtgttggcgttagactttgtgctgcattcatctgtgtgttcagggttgtttggggaagaaaacatttggggtgggagtcaggtgtctgcacgcttcactcagtgtcacatatctgttgctgtttgggtctgtctctgcctgagcagccagggccaggccagcctgagaggccccacgctgggtgggtggcaggagctgcccagtgttgggtggcggtgtgggaaacgcccactctggctgctggcgtggctgttccgtgtggtctggtttgcacctccctgtgtgtcaggtgctgggcccggaatgggggtgcaggccctggtcccacaagactcgaaccctcaattgcactggtacccaccacaccccctcggccctccccacccactgcatggaatcagcggattcattctaccgccttgagagggcgtggggggcccatgggtaaggcaggaaggccccggtgcaccctgcatcgggtctcagccggacacttctggttcttcctccgtgggagctgggttctccagtggccttcctcccacggaggccgggcctcaggaagtcctcacgggcgcccacgcccgctgcaaacgcccacagcactcgccttggggccaggattaccctgtccccagcagcggaggagcctcccatgtccagggtaaggtggggctcctcccctttctcataggctggtagggacacattttgcatggctggagggggggtacccgtataccacgcatgtttattcacgtgtgtgtgagtgtatggaaaagtgcacaagtcacaagcattcactttggggtttccacaaagcaaatacgcaaaaccatcgctcgggcctggaacggtggcactgtccccagagcctctcagcctcctgcaggcactggctgcgtgcttgtttgcgcgctctctctgaggtgatccagtgtggcgccccacacgcaggtgcttctgctgggccaggcctgtcctcacctgcatctgcccttagcccaggtggccctgtgggtcctcagtgtccccacttgcagatgaggctttgctccccccagggccctgcagcttgtagggcttggctgggactcagctccgggcagcgcagcaccagaaccccagccctagaaatagatcttgggacgttgggaagcccagagaggggccgtgacagaaccggagagcttggtcctgggttcactgcaggagagtttggtcctgggttcactggacagtgactccgtggctgctgcgtgccaggcaccttcaggtaccaagggcattgtcacgagcatgccctcgtcctggagttcaggtgggggcagccagtatgtggcccggtgagccatggagtccccctggcagtggtgggggtgtggacatgctgggaaggaggatggcagtgccaggcatgcataaagtgatcaaggaaggggacaaggggtccagtgggaacaggagctaaccaggggttcaaggtcagggcgtggggagggaggggcgctggtgacatgcatggttcccgggaccagcccgtcctgccatcccagaggcctctgcatcccacaggctgtgcaccctggaacgtggttgtggctttaggtgctgccaccagggggcgtggcagaactgtctttggggctgaccacgggcaggcggcccctcaccaagctgcttcctgttggtgccatcagagtctgggctatcctctcctgaagccctctctggtctccacatgccccacccctttgccctgtccctcttgtttccttccagggtacctcctcacctcctgtccaggtcaccagagcttcacctgtggacatgccccattccctgataatcctttcttcattctccatttctccaccactcccagctcccccagcactcccagctgctccacactcagtcccctgctccacactcagcccccagctcccccaccattcccagctgctccacactcagcccccagcacccccaccactcccagctcctccacactcaacccccagcacccccaccactcccagctgctccacactcaacccccagctcccccaccactcccagctcctccacactcaacccccagcacccctaccactcccagctcctccacactcaacccccaacccccccaccactcccagctgcttctccattcccacctgttcttccttcctggtgttcttctccccagacctggtctgactgtccctcccagtccctcattacctggggatggacgtcttccgctctgacctccaggctctcttgaaggctgctccttccctttctccccctgagctccttgctgtctcagacccctgcccaaggaggcctgtaactccagcccttctctgtgcactacacttggagtggggtaccgcccactcagcatatccagactgggccccccacgcgtacttcttcctgtctctgtcttgggggccatcatgtgcccagatccccatgagaaactggtcccagccacctgtttctccctgcccctccctctgccgccagctatgggttttgcctccaaatatgtccaagccacccccttcctctcctgtgcctagaccgggttcatgcctactccccacatctggtcctgacaccttccatccctccctcctgggacgaccagcccccctctttgtattactggctccccttgtctctcggctctcagcatcactctgcagagaggacttcccagcacgccctggctgaggaggggtccctgggccactcgctgcacagatctcgaggtctgtgagtacacatgtatcacagctttgtcatctgtctccccactgcactgggagtgtcaggagagaggatgggggcctcatgggtgccctccaccttccccggccaggcccgggctctgaggtggtgggctctgggcatgagcaggccagtgcgtgctgcgaggcccaaggctcacggacctgacacgcccaccttggtgcccgccctctcccaggcccctcccacctactgctggccagcgtcttcctctagggctccctcaacatcaccttttctgttttgttttaaatagactttattttctagtgcagtcttagcttcatggcaaaatggagcagaaggtacagagagtcccacacactccctgcccccacgcatgcacggcctccctcaccatcacccccgcacacccccgcccgccagagcacacatttattaaggcagccaacccacacggatgcgccatcaccccgagtccacggcatccgttagagcccactcttggtgttagccattccgtagattgggacaaatgtaggacacgggtccgccatttacagagaatgcaaaatggtttcattgccctgaaaacccttggctctgcccgttcctcccccaccctccacccccgtaaccactgatggtttttactgtccccacagttttgccttttccagaatgtcatgtggttggactcatgcactatgtggccttttctgattgactcctttcgcctggtaatagcatttatatttcctctgtgtgttttcatggcttgacagctcatttctttttagtgccgaataatattccattgtttggctctaccacagtttatccatttaccctctctcaagagcatcttaggcttgtcccagtttggggcatttatgaataaagctgctataaacaccggtgtggaagttttggtgtggacatacattttcacctcttttgggtaaatcccaaaggggatttaccagggagtgtgattgccggatcatatggtgagagttttgcaagaagctgccaaactgtcttcccaagtggctgcaccattttgtgttcccaccagcaatgaatgggcgttcctgtggcttcacgtcctcaccagcatttggtggtgttcgtgttttggattttggccagctgataggtgtgtagtggtatattgttttaatttgctatttcctactgacatatgatgctgagccccttttcatggcttatttaccatctgcgtatcttctttggtgaggtatctgctcagaatgtttgcctatttttaaattggttgtcccttttctttttgttgagttgtaagagttgtttgtaaattttggctcgtaatcctttcatggatatctcatttctagttattttctccaggtttggggcttgttcttcttattctcttgacagtgccttcacagagcagtttttaatcttaatgaaatcgagtttctcactggtttcttcttggattgtggtccgcccccgccttattaaaaaaagaaagaaagaaagaaacagggtctcactgtgttgcccaggctggtcccaaactcctgggctcaactgatcctcctgcctcaaccttccaaagtgctgggatgccaggtgggagccactgggctcagtcttgtgtttttaaaactcatcaccaaaccctcggtcatctagattttctcctgtgttatcttctaggagtttgatagttttgcatttcacatttaggtctgtgatcattctgagtgaattgctgtaggggtggaatgtgtgtgttgggattcattttgggaatgtgaacgccccgttgtttggctccatttggtggaggctgtgccccattgcattgcttttgccgctttgtcacagaccagttgactctccatgcggatttgtttctgggctctctctccgctttcactggtctgttttgccaacaccctgtcgtgagtactgtagctttatagtaagtccggagcctgccaagtcttcagagttgtaatctgcccctatcagatgtccaaaccatgcccccagggccctgagatcagatccccaggagggcctggctggagtacccatagccctgagcgccaggagagcagggtctgcctgctgtgggaggtctgtcctcgtgaggccggacacccagccctggttgtcctggtccacctggtatgaccctgccctgttcctgcttctcccaagcacccgtgaccctgggaagcctgtcacaaacacctccctggacaacccatgctacagagtgcaccacgccaattgccaccacagcctcaggcagcactgtcacccacagcagaggccgccctcacaatctcacacttcaggagcccaggtgggacgctagccagggtccctagaggtggctttgccggcccaggcagccccatctctccgggaccccgctgctccctgggtccagcccaggccctgattcagcagcagctccataaagaagtaaaacgagaatattcacggggcccacacttagtggactcctgtcacatggtgtccagcatggctcgtgggtgaggacagcaaaaccaccaagaaatgacccgagaggccaacagcagctccctgggaaggccacactctccaggaagacatagcaactctgaaacacacaacttaggtagaaatctaacaagatatttacaagatctgtgaggaaaattataaaactttaataagtcaaagaggtaaaatggaaagatattccacaccccttattatgcataactccttttattcctgataagcttctttgctctgaagtgtgctctgaaattaatatagctattccagctttcttgtgattaatgtgagtatggtatttcttcctctgttcatttacttttaatctacatgtgtctatttatttatttatttatttatttatttagagacagagtcttgctctgccacccatctctacagtgatgagatcatggctcactgcaacctccgcctcccgggttcaagtgattctcctgcctcagccacctgagtagctggtctacaggcacaagccaccacgcctggctaatttttgtatttttagtagagatggggttttgccgtgttggccaggctggtcacgaactcctgacctcaagtgatccgcccgcctctgccatccaaagtgctggggttacaggcgtgagccactgcgcccagccattgtttttatttttaaagtgggttttgtgtagataacatatagttaggtcttattttttgatccgttttgacaatctctgtcttttaattggtgcatttataccactgacattcaaagtcactgttgatatagttggattaatatctaccatgtttgttcctattttctattttttgtttttgttttttattttttctgccttttgtggttttaattgaccattttatgattttattttctattctttcttagacatcaattatactttttcacattttcagtggttaccctagattttgtgatacacatttccaactatttcaagcccactttcaaataacactgaactgcttgctaatcggtagcccaagtattttttgttttgttgttttttgagacagggtcttgctcagtcgcccaggctggagtgcagtggtgtgatcacggctcactgcatcctggaactcttggctcagcctcctgagttgctgggaccacaggcgcatgccacagcacctagctaatttttgtattttttatagagacggggttttgccacgttgcccaggctggcctcaaactcctggctcaagcaatccacctgccttggcctcccaaaatgctgggattataggcgtgaacctctgtgccccaccaaaagtatcttttaataacagtatgttcccaattcttcactcctgtcccctgtatcactgctattattagtttcacttatacataagcatatataatcaagtacattgttataactttaacaaacttttgtctgttccattaagattaatggccaggcattgtggctcatacctataatcccaacactttgggagactgaggtgggaggatcgtttgaggccaggagttcaagaccagcttgagcaacatagtgagagcccatctctccaaaaattaaaaaacgagctgggcatggtagtgtgcacctgtggtcccagctacttgggaggctgaggtgggaagatcgcctgagcccaggtgatcaagattgcagtgattacaccattgcactccagaacaagaccctgtctcaaaaaaaaaaagagtaagaaaaataaaagcttttattacctttcttattccttctcgatcactcgtgcctttctttatgtaaatccaagtttctgacttgtacattttttttcctctctaaagaacttttaacaccttttgcaaagcaggtctactagtaacaaattctcaatttttgtctaagtctatttttccttgacttttgaaggataatttcgctggatacagaattctaggcttgtggattttttctcaacactttaaatatttcagtccactgtatttttacttgcacagtttctgtaaagtcaaaactaattctataagaaatgaatgtattctttgtctgtagtttaggtgttcctccccacccgctgctggcttctttcaagattgtttctttaactttctgcagtttcaataccaaatgcctaggtgtagattgggcatgataccgcttttagcctgctctaaaacacaagcaggacttggtgcctggacaggcacccagcaggggagacagttccaggactcaccccagctgctgcgagcgtttccctgcaggaatgggatgtggctggggaaggggtgtggctgtggaagaggtgtggctgcggaagccttccaggctcctgctgggtctggaagtgctccctacccccgtgtctgtgttgctttcctggggcctccagccgtggtgagaaaggcgtgggtgggggccgagggaggggctggctggctttagactgtgctgctgcgtagatgggtgcctggcagcctccctgggcacagccgtggaagagactgccatctccgtcagcctcagtcaccccgaccctgaggcccagcggctgtcctagaggggaggaactggaacctgggaagtcgaccaggtgtgcaccatggggtcattggccggcactaaccaccaagtggcttcaggggtgggggcagcctgggtagaccaggccaggagaccggcccaaaccaaacggctgactcacgggattgtgagcaaatacaatgatggtttcaagccactaacaaaatctctcaatttcacttagcgtcatgttctcggggcccatctgtgttgcagcgtgtgtcagagtttccttcttatggctgaaaaatattccatcgtgtgcgtgggccacattttgtgtgttcattcctctggcgatggacgctcgggctgcttccatgttttagctggtatgaataatgctggcgtgaacatgggcgccaggtgtctctctgagactcactttcggttctgctgggcccacgcctggaagtggaattgccgcgtcatgtgctcgttctgacttgaggaactaactgccttcctgctctccctgcagctgcgccatcttccaacccagcagcgctacacaaggcttccggtttccccacatcctcgccgacacttgtcactgtttttgttgataatggatgtgaggtggttgtggggatttcttgccaggccttcccggggagctgctgttggcctctcgggtcatttcttggtggttttgctgtcctcacccacgagccatgctggacaccatgtgacacgagtcccctaagtgtgggccccgtgcatattctcattttacttctttatggagccactgccgactgcagggtccgggctggacccggggagcagtggggtcccggagagatggggctgcctgggccggcaaagccacctctagggaacctggctagcatcccatctgggctcctgaagtgtgagattgtgagggtggcctctgctgtgggtgccagtgctgcctgaggctgtggtgggaatggagcagggcactctgtagcgtggattgtccagggaggtgtttgtgacaggcttcccaggtcacgggtgcttgggagaagcaggaacagggcagggtcatcctgggtggacccggatgaccaggactgggtgcctggcctcaaaaggacagacctccctgagcgggcagaccctgctctcgtggagctcaggactgccggggctccagccagtcccttccccgctcctcctggggacctgatctcagggccctgggggcgtggtatggacgtctgacggggcagattccatctctggtgatgacttggcaggtccccagcgagaggagcgcagcaccctggctggtgctgcggtgggggcgaggggaaggcggggcaaggcgttcttcccacggccaggccaccgagtcgcctggagggcctcatgaggaatgagtttcactgcccagacaagcagtgttggccagccaggcctagttcctgattccagctcagcagctgactctcctgccatgggacctcagacaaatcatgtgcccgcggcggctccagagaaaggggctgaggacacctgctcatggggcttgcaaggacttgaactgcatgcgtgcgcgggtgtgcacataggcacgtgtgacgtgtgtatccgtgcgtgtgcaggtgtgcacataggcacgtgtgatgtgtgtatccgtgcatgtgtgtgtgcgggtgtgcagcgcacctgtgggcaggcaggtgtgtgtgcacacgtctgcacatagtcatgtgtgatatgtgtatctgtgcacatgtgtaagcctctgggaccaggtccggtaggccccagcctgcaggtgtggcatgaatggtaactatttttactgccttgcagtgtgagttaccttcttagaaaaccactgcagccacaagaaaaacaaacagcagccagtcatttagagacacgggctgggtgctgaatgcagcagagcctttctatggcgaatgcggagcctgtggccggcaggagccgggagggcatcgtctctaagcctgcagctggccgggtgctcccgctcctgtggtggtggcagtccagggctatcaggcgctctggctgtcccggctcccgcctctgcctggtgggcagaggggaggattggcagtttgctcctgccgtgtggcgtgtggcttgtgggacgcccacattgccggtcctcaggctgcggctgggacacaccttccgaattttccgaggaccaagtgcggtcacacacaggaccatgctgtaaacctgcgcggctccgagcgagtgcacggggctggcgggccctcgattcgtcagcagtcggggtcagtgctggcccagagccaaggcggctcgtgggtgtctgggaggtttggggttgctcagaggagccccccaggtcagacttggtgctccaaccccttctggaattctttggtccatcccagagctcggctcacattcttctcccatcttttaggccttctggaaccttccagggccctgttgctcccactacttcttctgagggcgtgcctaccacgtgctggctctgtacgtattttacctcatttagcagttgctgcagatgtgcattgtagccgtatcggaaacccagcgctgctgtggcaaaaaatcaccacaccccaaaccagcagagattcaccccacacccccacaccagcagagattcaccccacacccccaaaccagcagagattcaccccacgcccccaaaccagcagagattcaccccacacccccaaaccagcagagattcaccccacgcccccaaaccaccagagattcaccccacgcccccaaaccaccagagattcaccccacgcccccaaaccagcagagattcaccccacgcccccaaaccagcagagattcaccccacgcccccaaaccagcagagattcaccccacgcccccaaaccaccagagattcaccctcccacagttatggtgccagaagtccaaggtcaaggtgtgagcagggctggcccccgaggccgtgagtggggtctgtcccaggccgctcctggctttgtggcctgaggtcttccgtgcttcttggctggcggaagcactgccacggcctcggccccgtgtcatgtggcctgttctctctctgtgtgtctgggtgggtcagggcccacccagctgaccttgctttaacctcgttacctctgtgcagaccctgcctccaaataaggtcacactcacaggtctggggtcaggacctcaacacatggctgtgggggacacagttcagcccaggagggaaactgaggcacgaaatggggtgcatttcctgaggccccatggctcataaggagacgaggggctgcgggttggggtcccagatgccctctcaacacagcagccaccatcctggctagtcccaggccctcctgggtcccccgtctttactcagggtggccctgtgtgcctggcctgtcctcaggtcaccctgactctagtatgggacaccccacctcagagggcacctcctcggggttgggttatggtttttttaagtctcttggaacgcccccccgatggcgtgggcccagctgttgaggaggtggggctgtggtcttggctgacggtgcggtgcccgcatacctgacctggttaggacctccaatctggaattgctactgactcagtttccccacatggaagccacccctcatgccagcgacgggccttcttttctgtcccctgctgtggcctccctggcgggtcttctgcaccctgtgtggcctgggttcttggccccaggggaaaagggggctcctgctgggggcagagagggaggggcagggcagggcccggagagagatctcaggattgtcttcggatggcacggcctggtccctcaggttctgatcattttcttcattttcacgactccctgcactttctggttttgggtgaggccaatagcagaagtattaaaatattcctccttgggcgtctcatggtgtttctgatctgggctgaaacaggaagctctgtgagctgatgtggcaccggaagtctctgggagcctgggctgtgatccggcccagcccaccctggtggggaacgcgtcctggggaccgtgctgggttttgggaaaacactgggtcaccctctcccattgaaagatggcctgggggagctgggtcctgtctacgtgagtttgccggggccgcctcgcacacaccgtggccaggtgctcccacagcagatgtgggttctctccagtcctgggggcgtcccgggttgaggtgcggcgtggctgttacgaggcctctccttgcaggcaggcggcaccacctccctgtgtccttgcgtggccgcccctcctgcgtgtctgtgtcctcctcttttaaggacgccggtaggtcaggtcagagcccaccctggtaaccttgtttcacctttgtcgcctctgtaaagaccctgtgtctgaatacaggcggatcctgaagtcgggacttcactctgtgaatttgggggacgcagtgcagcccataaccttatcttttgtgtgtgtgtgtgtgtgtgttttaaatctgtatgagggctgatggcaaagcagttagctgtgttgtgtagacaacgccgtggccagaacagagcttgttctcgggcaaaaggagagtgaggaagctgagcagggatggcgtcccagaggcctcggaggccctgacatggtccaggaggccccaggaaggctcttgctgtccctaagcccagaggttttcaggggtctatgtgaattgtcactttttttctttttctttctcttttcctttttttttctttttttttttttttttgagacagagtctcactttgttgcccaggctggagtgcagtggtgcgatcctagttcgttggaacctccggcctcctgggtttatgtgattcttctgcctcagcctccccagtagctgggactacaggtgcccaccaccatgcccggctaattctgtttttgttttgttttgttttgttttgttttgtttttttaggagagatgggatttcaccctgttggccaggctgctcttgaactcctgaccttgggtgatccacctgcctcggcctcccaaagtgctgggatcacaggcatgagccaccacgcccggcccacatttcctttttttaattggtagaatctatacaaaacacaaggtttaccactttagccactttaaagagctcacttggtgtccccaagggcccgtggtgccaccactgccagtgcacaggcccggcccctcccccgccaggcctgtctctaaggccttgcccacccacccctccccctacccaggcctgtctgtctctaaggcccgctgtggccacacgtggaccccacaccctggagaacctgggcttgtccttggaggaagtaataacaaagagcccacctggtcgtggatcccagctctgcaccaatggccgtgagaccggggcccctgcctcagtttcctcatctgtcagtgagcctggaccagggtagtgaggtagtgtgggaggccattgcagtcctgggcacagccctgggggccaggagacgcctccatcagccgtgggcccaggcgctgccagcagcagggcagtccctgagggtctcccccggagcactccagacccccttcccctccggatccccgcacgcctccgctcctcagcagatgacaggccagctgctctcctgggctggttctgcagcgccgactgaggtgagggctcctgtgcaggtgacacgaaggagggatgtgcagatgaggggacaggtgaggggcagggcagggcctcccttaacccaccccctatggccctggcacagaggttccagtacctgcgctccaggggcagggcctcccttaacctgccccccatggcccaggcacagaggttccagtacctgggctccaggcagagtgtatctagcaccccagagaccgaggcgggctgtaccgttggctgctgggagcgagagccctggctgggtaggcaggggacggggaggggagagcatgaggggaccctcccagcagcctctgcatgcgggcagccggcctgccaccctgggcaagcgggaggggctgccttgccaagggaccctcacagatgaggtgtgagggacagagacccccgacggctgctggaggcacccacggggctccctggagcctccctgtggtcctgggtccccttacccgattgttgcaggaggggccagcacagggcaggtgcctgaagagcaggtgccggaagagctaccgcagcccaggcagcaggggaggaagtcagtctccctcgggggggtttccagacaggggccgcttttgttgagggcacagaatgtctccaaaaggtcggttcgttatcacgagtcaccagagagaggggaacggagagaggaacgccgcagcctccagttccccttcagctctgtgcccaggagcagtggctgggtgagggtgggagccaggctccccgagagggcagcagcggaggctgcaccgtccctgtcctgcctctgcccctgccctgtcctgccctgagtccctgccccctccttgtcctgcctcgtatccctgccccctccctgtcttgccccgcatccctgccctgtccgtgtccctgcccctgtccctgcccctgccctgcccctctctgtcctgccccacgtccctgcccctctccctgccctgccccacgtccctgccccgtccctgtcttgccccatgtccctgtccctgccccacgtccctgtccctgccccacgtccctgccctcatccctgtcctgccctgcatccctgccctgcccctgcgcctgtcctgtcccgtgtcccgccccgtccctgcccctgtcctgccctgcgtccctgccccatccctgtccgtacccctgtcctatcccgcatccctgcccctgtccctgcccctgccctgcccctctctgtcctgccccacgtccctgcatgggtcctgggcctcagcaccaggttctgggcccgcttccttgcagccccttccccagagcccaccaaagacccgaatcctcacactctcgggacaggtagctgtgggtggctgagagggactggcccctccctggccaagtccacaatgtcaggacccttgctgccctcctgcttcgggctcagccccaatgcccccgatttgaagtgaagctgcccagtgccctctctggggccctcccaggagatgcaggctggaggggctgccctggaaagcccttcctttccctagagaggtccccgccctgagagggaagggcccgggcgatgattccaggctgggaggaggaaggcgcgtgccaagcgctcctcggagttgatgccccatggcgtaatgtgcagctgctgctggagaagagatgcaggcagattactgaaccctgagaaatgaaaaagcatgatcgcggtcttgccagcataggcggccgtggtccgtgcttgcaagtctgagggcggaggagcccgccgcccgcttctcatgggcccacccctgtgatccagcatctgtaaaactccctgggaggccacagcctgccctggcccagcccctgggaccgcgagggccgtgtgatactttctccagtggcatttacagaaaacttccctctgccctaccattttagttggctttgggatagtttgcagtatttcctgattaaaataatgttgagaagaacatttgggcctctgaggccttttccctagggtattttctgagaaatgacagagattcaagggctgtgaacattttgtagccatgttgtgttatagaaaagcatgtgcgttcccacatgcgggctgctcttctgtgggattcttcagactggacatgcggtgcggggctggacatgcagttgggggggctggacacgcattggggggctggacacacggcaggggggctggacacgcgggggggccggacacgcggcgggggggctggacacgcggttggggtgctggacatgcggtggggggctggacacgggggctggacacgtggcgggggctggacacgcaggggggctggacacagcagggggctggacacgcagcaggggggctggacacgcggcagggggctggacacgcggcagggggctggacacgcggcagggaggctggacacgtggcggggggctggacacgcggcaggggggctggacacgtggcggggggctggacacgtggcggggggctggacacacggtgggggggctggacactcactcggggcctggatacatgtggaggtctgggcaggcaggggcctgtgtgtcaggtgcccatggcatatggtatgagccctgcttttcttttcttcttttcttttttttttcgagacagagttttgctcttgttgcccagactggagtgcaatggtgcaatcttggctcactgcaacctccgcctcctgggttcaagggattctcctgcctcagcctcccgagtagctgggattacaggtgcctgctaccacacccagctcatttttgtatttttagtagagacggggtttcaccatgttggccaggctggtcttgaactcctgacctcaggagatccaccggcctcggcctcccaaagcgctgggattacaggtgtgagccaccgtgcccggctaagccccgcttttctagatcttgggctgggggagaaaaaggaagccgtttcctctccactcccagggcccagggaaagggaggtggtcctggccccctggggagggcaggactttggttgtagggttggcccccagagccaggggtggaaagggtctccaggggagctggtgggtccttccccgctgggctctgctcagcctgtggtggccacgtggcaggggccccatcccagaccttcagccactgccagcccggccagcctgcgtctgacgatgtcagttctctcgggtttccttgatcaggcttcctcaatgcccagagctttgggatacttcgtggtggctctccgggatccaggtggccaccgtcctccctggctctctgtgttgcccactcctgaggccctggctcctggatgcttcagcctacgtgtgcctcctcgctctgttttcgtgggtgctacccctacgcagggcccacctcctggcttcagcccctgcccactctttgagcaggggtggatctccccaacactctggcccacacagctgtgcttgcggccaaatgacacaggcgcggcagagactcttggagcctcttcttgagggggactcaaccttgggcttccatgtgcaaccctgccgagtccaacggagcaggaacccagagtcaggtcagagagaatcccaccccgatgtctgagctccaggagcagatcagacctcagtcctcgacgccttcagcaggatgccccggccctgccgcaccctcctggtgattttccagccacggaccccctcacttctcggctgtgaaccccccttgtcctgctgcacccaacatagagcccgtctctccctcactgcgggagtccataatgaagtcttccttgccattacgataagcaccaggataatttttccttaacaggttctctctagactggatcagggacagtcttggctgtaaattgtgaattagctgtgactctgccacccacggttgcccgccagagttctttctaaatgttctatctgagcctggccgttgctcctggctctggaggtgccagagtttctgaacgttaatctgagcctggccgttgctgctggctctggaggtgccagagtttctgaacgttaatctgagcctggccgttgctgctggctctggaggtgcagtcacaccaccctggctgacacgcctcggcctgacctgcagtctcaccccacagaaggatctggggtgaacgtctggctccaggcactgttgcagggctgttgggtcctgtgtctgagcccacaaaggcttcctgggagcggcatcgccagccctgtggaccctgctccctatgggcttctgggtatagatcaggtgcccagcatgcgcccccagacaggagctgccctctgccctgcctctgggacccactttcacccaagtcctgtgggactggcatagcctagggcccgggtgctggcagcgtctggctggagcctggggcggggcagggcagggccttccaggcgcgttcccgagcgtgcactgaaggtgttagcgcgtggcaccggagacaccaggctggatgaggctggacaagcgcctccgccagaagcagcacaggcctgacacaggcaaacctcccggagaccaccccacggaccccagcccctgctgaccctcccaggaggcgttgctggaaatccaccctgagaattctgctccaggagctgaaccagcagtatcagcatcttaaagcactgacctacctctcggctgtgtgatatctaggggtccgtcccagaccagcatccccagggctgacgggtctgcagggcacagagatgtgggacctgctgtgtctctgccccacagtggccatgctgggacacagagctgctgcttggggaagggacagattcagacacagtagtgggttaacctgaggccctctcaaaagacatgtccacctagaacctcgggaagggacacgtccgcctggaacctcgggaagggacgcgtccgcctggaacctcgggaagcgacgcgtccgcctggaacctcgggaagggacgcgtccgcctggaacctcgggaagggacgcgtccgcctggaacctcgggaagggacgcgtccgcctggaacctcgggaagggacgcgtccgcctggaacctcgggaagggacgcgtccgcctggaacctcgggaagggatgcgtccgcctggaacctcgggaagggatgcgtccgcctggaacctcgggaagggacgcgtccacctggaacctcgggaaggcctttgcagatgtgatcgagttaaggatctcaagattcaagataaggtcaccccaggttgcctgcctgggccctgagtccagtggcgtgtcctggagggagaccagcagaggtggagggcacgtccatgggctgagaagggcaggactgtgacaggagggaggtgcagggcggatccccagagccactgcctccccacgcttgacctcaggctcctggccccagaaccatgagggaataaactgtccttttaagccctctgctgtgtgatgattggcagtgccagcaatgggagctgatacagaccctgatcggggacccagacacctggcagcttgggctgggccccttcgagttaaagctggccttgctgctacctgtccctcgctgagtcctcgctgcgcactgtggctgcacctggcaagcacagggagcccctggggtcctgtgggtgcagacatgggtccctcggtctgggtggctgagatggagcccctccccagttccggggagcactgggccggggaccacccatgagtggtgagtatctctcccgctgcaccttgaggtcacccaggaaccttcagaagtgctgatgcggggaccccgctccccactgtccagggtggactggctaggcggtggcctgggcatcgggacacattacagctctccagggagcgcggtgtgcagccaggatggaacccgtggtcctggtgctgaggatggcgggtgcctgcctccatctccgtgggccagccttcggggccccgtttcctggagcagcgagggcttcacgtggctgttgagctgcagaaggaggggccctcccggcaccccattcagagccagcggaggaatctgaaggcatggggagggcggggtggagccgaggttgcagagaggctggaccctgaagcctcaggagttcaactggcacggggtgcggggagtggcagccgggaagccggcctggggctttctcctctcggcctcctttgctggcgtctcaggtggaggggcctgtgtggcaggcgggtggcctgagggtgaggggcctgtgtggcaggcgggtggcctgagggtgaggggcctgtgtggcaggcgggtggcctgagggtgaggggcctgtgtggcaggcgggtggcttgagggtgaggggcctgtggggcgggcaggtggcctgagggtgaggggcctgtggggcgggcggtggctgcagcgtggagattgttgtcagcacagaattgtggcaccagttgttgagacgcagtgacaggcagatgactggccaggcagtgacaggcagatggctgcccaggcagtgacaggcagatggctgcccaggccgcggccttgtctgcacctgcctgagcatgcagagaggcccccacactggtcacccagggtccgggtgtgcccacagatgctgcccccgcgctgtgggcagccctggcccaggcaggttctctggagctgctcccgcccagtgcaggccgtgtgcaggacctttgtttatccccctggatgttgaacttggccagcgtacggcactgaaacaaaggccctgactgctgcctgaacccgccccgggctcacttccatgcccaggcctgcgggaggggctggggtgtgcaggagagttgggcgttgggaggccaccccaccgcgtgcctgcagtgccctcttctcggccccagtccccagcatatccatggggtgccttccagtgtgggtttcgggaacctccacattccagcctggagtcctggccatggggaagggacgcccactgtgctcatcccgtgcggccgcctcgtgcccatcagaggctgcaccaaaccccgtgcgccctctgggcgatcagagccggaggcctcaagtggcccagccctgctggctgctgcgggacctcagctgctgtggggcaggcgtctatgggttcccagggccctcccctccccacaggggtgtgaggaggtgcaaaggggatgcctcctggcctgaccccacggccagaccagtcctgtgtgtcctgagtgaggacgcctatccctgagccccagaaacgcaccaggaggcaggtgtgagacggctgtgtccccagctcctgctgcagttggcccacagcgggcccctacgaggctgggcggtgaggggacggctcggaccgcccgcgccccaggacccctgtgtcggcctcatcctgcgcctcagccccaaaccctgcagctcccgggaccctggcacccggtcaccctccacagcgccacggggctcctctgaccccacccttgttgccagcccagccggagtctgacttctccgtggtgccgcccccacccccgggaatgacatgccggggcggtggagccaggccctgggcccgggggcaggacaggcagggaccatgagcagctccacagaaacccttccccagggcttcaggggccaggcgggacccccacttccgggaggagaccccagtgcccctcacgctcaggggtgcggtgggtggagagattcggaggggagagctgggggctccggaggaggggctgtgggtgggaccccatccccctctggctgcagcaggcagtgaagctgcatcaggggctccaccctgctgaccacagtcctggggcacccagtggaggccggagacaccagcaggttctcctggtcacatggccccacctgccctgtcccccagagccccccaggcttgggatgagttgcgaggggtcggatggacggcgcaggacacacgacacagagtagttgtggcggttgcccctagggagacgtggagagaggccccagggcaccctggaagcggaggctgtggctccgtgtgtcccagggcacagcaccgcccctcacagccgaagctctgatcccttggtctcaggaaacactcaggaagtgcagggcgggcgtgggtctgatttcagggtgagggagctggcagccccaggagtgaggaggccccagtcccctttcaccaagcccgtcctccccttcccgctgccacgacactggtgcctgcagccgtgccagctaggagggcgacgtggacaggatttctctctagaaaggatcctggggtccgattgagaagctggcttgaacgttagacgctgtagctcagagcactgggtatgcacccagaaggagaagtgctcatcacatggtaattcttttgttttgtttttttaagaaaaaggtctcactctttgcccaaagcaactttcttatttatctttgcatcttaagagtctaaaacaatgactggcatgaagtatacaaactatacatcgcctagtaagtggataaaacgattaattaatttgcccaacattcaaaacgtgatggggtgggattcacagccatgacttctcattgcaacgctcaagctccttgtgctgctccacgccgcctttcggtacacgagaagctgaggatccacgccgcctttccgtacatgagaaactgtaggatccacgccacctttcagtagagaagctgtaggatccacaccgcctttccgtacacgagaagctgtaggatccacgccgcctttccgtacacgagaagctgtaggatccacgccacctttcagtagagaagctgtaggatccacaccgcctttccgtacacgagaagctgtaggatccacgccgcctttccgtacacgagaagctgtaggatccacgccacctttcagtagagaagctgtaggatccacaccgcttttcagtacacgagaaactgtaggatccacgccacctttcagtacacgagaaactgcaggacaaatgaccgtatgcccaggttccaatggcaaaacgccacacctcttatgatactatctttgtgcacataaaatgttcatttttgtctaataaataagtgacttgtaattagtaagtgattgctcaatgacttaaaacctacaatatctctaatttcttctaatggaaacttctgaggccatttagggacatccacagatagcgaacagcgacattggaaagaggacattgagtgtggggaagtctgcacagttccacctgttggattgtttgatgtgtggtggtgcagacatggacacgatccatcttggtttttttgttttgttttgtttttgagatgatgtctcactctgacacacaggctggagtgcagtggctcgatctcggctcactgcaagctcctcctcccaggttcaagcaattctcctgtctcagcctcctgagtagctgggactacagtcacatgccaccatgcccggctaatttttgtatttttagtggagacggggtttcatcatattggccaggctggtcttgaactcctgacctcaggtgatcggcccgcctcggcctcccaaagtgctgggattataggcgtgagccaccgtgcctggccaacactatccattctaaagagggttcatgctcttcgaccccaacaaagaacggtttcctttgcggtcgtggatgggtaagaaatcagccttgaccacctaagggcgtagcagggcttctgcattaggtgacaattttaataatcctctgttttccgttcacacttaggagtctgtttctgccctgggacaaggacccagaggccactttgacgttatagagcaggctgtgtcctccgtcatcctgctgtagggagtgttgtcagctttcccaccaccactggcatctggaaagcttggtctgtttgtagtgacaggtccgattgcagggaaccaggagcgtgtctgatgcatgagggcagagtttctacccagttacctgcagtgtggagacgagagacgcgatctaaccctgcaaacacttttgaaaaaaaactagtgtataaaaaggaattagggaatcaaacctttcttaaggggcacagaataagacagtatacaccagtgtgaccgaagtttttatttctgctgaagaattcagctaaagtgcagctgcatgatcatagctcacgggaacctgggtctcctgggctcaagcaagcctcccagcccagcctcccacgtagctgggactaccggtggccatcaccatggctggttaagttttcatttttttgtagagacagaattttgccattttgccccggctggttgcgaactcctggcttcaagtgatcctcctgcctcggcccccaaagtgctgggattacaggtgccagccaccgcccctggcctggcagttctatttgaattgttttagggactgccatcctgcttcccacggtggcagcactgttttacactcctgccagcagcacccaaggggtctggttctccacatccttgcccgcacttgtgattttctgtgttttgataatagccatcccgatgtgtgcgtgttgtgaaaactgtgatgtacgtagaaaagtgtaaagaataagagtgtggacgcccagcccgtcccctcaggaaacgcttgaaaggcacccaacctctttcaggatccgtgttccattcgcattattttttcatgcaccatttttgaacacaagttgcagacatttgaacactggccctaaaaacatcaatcagcaaacttctgggaatgaggacactccccgcgtcgccgccatcacaacaaggccttcggaaaactccacacagcatctagcctcccactcgcgctcggatgtcccaggtgccctcactcggtgccacgccttgcctttctggaatcgtgccccagcttgttagagtggcactgactctgctgggaggatgtcctgccaccggggtttgtcttttataacaacttgtccctccttcccctccctgggtttgtgataacctggaggttaaaccttagagcagccgctcttcacctggggactttgccccaggaggcgttggccaactctcttgtgcctggaggaggaaggcagattgtgcctggaggggagaggctacgggacggagcggagcgggttaggtgctctgcccagttctcctgcttctgcacgtctctgccgcctctgcctccctgctcattgccctctctgttcccggcctctcctctcaccctcagagtaaatgtcacatcccagagggccactggtgctcaggccacctctcaccctcccagcctgctgtaacctggacccccagtttcccccatctgccctgcccaggcccctcagctccacacccaggaccccaggcctgacactcttgggtgtggctgcacgcctaagggcagagggcttgggtagggggtaagcgggggctgtggccctgctgcccccgctgcctcagtgggagaggccctgtgggcagcctgagagccgaggcctcagtggtatttcctgggagggcagcccccaacctcctgcacccacagaggggctggagcaggacacagggtcgctggccccgtcctcgggagcaccacagggcacaggcctggcctggcccggccgtagcccagagctgacctttccttgttgacttgtggtccgggactttccaggacaggcttcttgccacagagaaggctcccggggaaaccccaggagtgtgaaagtggagcagcccaggtccctgccctagaagagccaccaggagccaggacaccccctcccggggacccctcccaccctccagccccagcttgaccccagacctctgccctcagccccctggctgtgtctgagcacctctgccccagggtctttgcacggaccgttctgcctggaaagttcttcccgagatctgctgaggcggctcctcctcggccgcacgctccctgaggcttcttcacccgcgcacacacgggcaccgcctgcctcccggtctcctctccccagaaccttagctccagggtgcagggactcgcccacgtggttccagcccagggcctggcccgagcaggtgctccctctgtgcttgttgaatgaaagcgaagtgaccaacagcacagactttttccgaggaagagagagagcagagagcaaagcagaggcctgagggaccctgtgacccccaagcccacctggctggttccctgcagacagccctggctcctgcactgctgcttttccccgccagggaccaggcccccaccagccaggagcccgggacacgtccatgttctgggacttgaccttcgtctccccacagcctgcatttccaccctgcctggccgcagctctggttggtgggaaggggctccaggcggccccgctctgctccggtacgtgcagacatctggtgtgcagtgaccttcatcccaagcaaggcctagaaagggggaaatcgaggcagcatagagagccggcccagggcagccttctgggctggagcatgggggtatgagggggctgccggtgtggtgtgggtggcccgtcccctggtgatgagtgtgtgggatggcgctcagcctctgcctctgcggcctgctcagtgggccctcccactcccctggagacgtctctgtgtgcttgtgttaccagaaaggagtcctgatccagacaccaagagagggttcttggacctcacacaggaaggagttcagggtgagtccagagagtcaagtgagaagtttattaatagagtaaaggaataaagaatggctactccagaggcagtgcggagggctgggctgctcagctgaatattcttatgcttattttggtcatttcttgattatatgttaaacaaggagtggattattcatgaattttctgggaaagggtggtcaattcccagaactgaggcttcctctcctttttagaccgtgcagggtaactttcggacgttgccatggcatttgtggacatggcgctggtgggagtgtctcttagcagctaatgcattagaatttgtgtataatgagtggcgagcacgaccagaggtcactctagtcaccatcttggttttggtgggatttggccacttctttactgcaacctgctttatcggcaaggtcttcgtgacttgtatcttgtgccaacctcctgtcttgtgactaagaatgccttaccctcccgggaacgcagtccagcaggccccagcctcattccacccagcccctattcaagacggagtcgctctggttcaaacacctctgacagttggacaagttggtgacagccaggagggcccgatgtggacatgtgacaggcaccctgtggccatcagattctcaggaggaagaaatccccttctgaaataaagcaccctgagaaccggcgggaaggagcggggactccgtcggggctttccagggaagcagccagggacttgccctgattttggtttctccaggttggagccgccccgcaggctgcctctgccggcgggaggaagtgagcagctcctgcggaacctctggctggcacagagcccgggggcgggggagccctccctgccaagagaagccatcaggtgcagaggacagcactgactgggccagtggggcgttctccagctgggtcagccgtggcccccgcctcgggctggagtccggcaggcaactgctgcagaaacggaggcagaggcaggtggaggagccgcctccaggcggaggagccccagcaagatggggcgctggagttgagctcaggctgtcagccccagaatccaagctccttgccctcgtgctaacccagcctcactaactggcagctgggggcaccctcccagcctgccagggacaccacactgggcacacaccacttcggctgcaggaccccatcctcactggctgtggcgggagactggtgagccgtccttgtagacgggactccccctagagtcctgaaggactgtcctgggggctggggagctgctggaggcagcagcctgggccaggagatcactggggtggtgaaggggagagggttagggcttcggtagggggaccccctatagaccagacaacggattccacagccaccacccccacccctggctgacctcaccttctgcaagggacccagtcctggacagggtcactgaattgctgccccctaacctgtccccacccactggagacctcagcctgccctgctcaccctggcaccggccagcctgtccacgctgggtgcccagggcgggaaaacaggtgcgggttcccatgactgcatctcaggactcctgtctgcgccccttcttggcgtgtctttaaatgtctttgttaggccgctcattatgatccctcctgttttaatggaaaaatcttgtaaacactgggaggaccagtggtctttttctttcttaaatagagatgaggtctcactatgttgcccgggctgatctcaaactcctggcctccagcgatcctcctgccttgacttcccgaagtgctgggattccaggcgtgagccactgggcccggcctaaattcttcttctgtacttgctggttttcccaaaatgtgcacacactgatgttagaatcggaaagagtatcactcctgtgacagcagtgggaaggtgtgtgttacagccacaggtgtccacaggatagaatctcacagcaacagacgtgctaatgtgggcactggaggttgcaccctataccgggcactgcccatccctccccagttcccagaccagctacgccagggatctggagtccccttccatgagtgtgacgaggacaggtgaggtctcctgagtccttaccagcaggtcaggcaccctgttgagtcgtcttcagaaccctcaaaagtgcacgcccctgccctgtgggtctgggccacgatcctgggacacagttctgaatgctgacatcctgaaagatcaaaatcccaaaattataattctggaaaaactaattcgaaaacattctgtaaaagacatttgtttggccgggcgcggtggctcatgcctgtaatcccagcactttgagaggccgaggcgggtggatcacgaggtcaggagatcaagaccatcctggctaacacagtgaaactccgtctccactaaaaatacaaaaaattagccgggtgtggtggcgggcgcctgtagtcccagctactcgggaggctgaggcaggagaatcgcttgaacctgggaggtggaggttgccctgagccgagattgtgccactgcactccagcctgggcaacagagcgactctgtctcaaaaaagaaaaataaataaataaataaataaaatacatttatttatttatattttaagggggatttgagaaactgaaaaacacgacagcacccctcataggcgactttacccaataaagtcggtgatcataacattttctccagcacagacacacaggtgtgctcattcagtcacgtggatatgagttatgtgcagatgaaccattcacagagaaactggtcagaacaccaacatgttaggttttgatctttcaggagctcaggatttgggatgacggtgttcggggtcaggtcttttgaggttctgatcagcgccgcctcaccgcgcgataccagtgcagaacggggagacccaggtcgtccaggagctggactccagccgggacagtctgtctgtgtcagagcccgggtccctcatggggcactcagccttcactcgggtttcctgcaaaaatggagagctttttttcaagtagggatgccaaggatggcaggcatgaagcgggcaggcagaggtgggagctagttagcagcatctccaattaccgtgatgggcagaaagaaggttctagacaacagtgtcttgatgaggtcaagaggaactgaaacccccaccccacttcccctgccccatctggttctgggaaaggggaaatgcaggtgccggctgtgcgtgggtcagtggcccgcccccgcctctctgcctcgcggacgtccagacttccgaggcctggctgtctgcagggcggccattgctgtgcgcgcgcgcgcgggcatgtgcatggttcagggaagaggctgcatttcacagagactctgtcccaggaggtaggcattttttcttttctttctttccttccttccttcctcccttccttccttccttcctaacttccttccttcctttttctttctctctcttttcttttctttctttctttttttttgacagagtcttgctctatcgcccaggctggagtgcagtggcgtgatctcggcttattgtaacctccacctcccaggttcaagcaattctcgtgcctcagcctcctgagtacctgggactaggggtacgcaccaccacgcccagctaatttttgtatttttagtagagatggggtttcaccatgatggccaggctgatttcgaactcctggccttaagtgagcctcctgcctcgttctcccaaagtgctgggattacaggcgtgagccaccatgcccagccggcattttcatctggactctgccatggggctcagcaaatcagatgtgacctggtgacaggtgccaagaaggtctggcgaccacaggtttcttgtcggtttctgcctgggacccccgcacctccctaccagtattcccaacccaacgaaagaccggccaagtacaaaccaagggcagccctgaagcccaggaccatgaggcctggaaggccccaggacaggtgatttgtggccctggtgtctcaggtcaggagcagggcagagccaccttcctccctccctgtgcggggctgcatgagctcagggacctttggacctgagaaaggtcaggctcacttcctccccgtgcctgcggttggccgcagggggaatattctcctgacccgagtcccgaagccctgggcgtggagtttccctggactgggagaaagtaaacaccgagggacttgccaagaggaaatggagaagcccaggtgttctgggcggagctgagtgtcccgcagggggttccgcagctcctcgcctctggaagaccaaggacagctttccccagggctacagcctcacgctcccctcccatcgtggctgggcctttacttgggggtgagtgtcctacagacgaggggcttaaagctacaggaatgcctcgtctcgcagagctggaggctggaaggcagatcggcctgtgagggccgcggtcactcttggtcctgagccctccttgtccggctgctggtgtcacgggcactccttggggttccttggcttgtgggagcatcgcgccggccccgcctctgtcatcaggccgcctccccttctcttctcgaaggacacctgctacggcgagggcctctccaggatgacctcatctcgttctccactaatcacagctgcaaagatttatttccaaataaagtcgccttcttgggttccaggggacctgattttgggaggcgctgttcccccagcacagggatacagcaggcccttggcctcatcggacatctggtgcccgcgcgccctctcactcacgttgtccaggcctctgcccttctcaacacccggacgtgggcgttcaggtgtccttcctgccctggcgtatgccccacttagctgagtggggggcttagacctccgccccatctgcagtcctcctggggcctgccaatcagaccccctgcagctgcatggtcttggggcattgctgtaaggccctggggcctttctgaatccatctgcaagctggagctgagtccaggagctgaggccgggagcaggaggtgaggttgctagctgaggctgggagcaagagctgaggccactggagctgaggctgggagctgagatgtggagctggggctgaggctgggaggaggggttgaggatacctggagtttgggagctgggctgagaggccagggaggagagccctgccaccaccctgctgccccccctcgccacccccctgctgccaccttgctgccaccctgcctcctgttcccagccctctggccagtccctgtgttcgttttctgttttctacttaccagaaacttagcagcttgaaacagcacccgctcggcacacattccttttgggagtgtgaaatggtgcagctgctgtgggaaatggtctggtgattcctcgcaaagctaaacaattgccatagcaccctgcagttccacacctggggatgcacagccagaaatgaagacgggtgtctgagcaaaaactcggacatgagtgttcacagcagcgttattcacagtagctagaaggtggaaacaacccaagtgtccgtggaccgaggaacagatcaacaggccacggcgcacgcacgacggagtattgtgcagccagaaaaagggtgaagctcccttacacattatggcgtgggtgagcctcagaaacatggtgctaagtgactgcgtttatataaaaagcttgcactgatgtaaagtgtctagagtagagaaacccaggagatgaagtggattcgtggcttccagggcctgagggcagagggaagggaccggctgctgatgggtctccgtttgggaagatgaacgagttctggagcttgcttgaggcagtgtctgcacaacagtgtgagtgcacggaatgtggctgaattggactctttaaaatagttcaggtgggcaatgttatgttatgtgtgttttactaccatacaaataagtaaataaatggacaagcctgcaccatcttgtagctcacacctgcaggtcaggagccggcctgggtcccctgctggggcctcacctggggctcaggcctcctcccaggctggttcagaatccaggtccttgtgggtgtgggactgaggtccccgttttctcgcagctgttgtcagggactgccctcagctcctagggctttctctcgggtccctgcctggtggcctctggtggcccctccatcttcaagcagcaggggccggtggagtccccccatgagtggctctttctggccatcccttctgcacccgccagaggaaactccgcttctaaagtgttggtgtgatgaggtcaggcccggaggcacctccctgttttaaggtcagcgggttggtgaacttcaccatgccttcagaatccctctgccacacaacacagccgtcttgggagtaacactggaggcagagaccacgggcgacctccaagatctgcttacaacagtcgtttcaacagagttgagtcagcttggggcttctccgagtgactgtgcacaggggtcctggggcttctccgagtgactgcgcgcaagcgtcctgggacttctccaagtgactgcgcacaggcatcctggggcttctccgagtgactgcgaacaggcgtcctggggcttctctgagcgactgcgcacaggcgtccctggggtccctggggttaggatgctggcgctggctcagcaggtctgggaagggccaggattccagtgcccaggctaccgtccaggtccacaccatgccccaatggacgctctccagcccctccctgaggctggggccatgggatgagctcagtggcatccagatcagagtccaccccctccacaccttgccatggtcctgatgtcaccaagtgcattgtagccctaaccctcgtggaccccccttcatggggtggtgcaggcagcgtgttctctgagggtaaggacagggcccaacaggggctgccccaaggagccagtggagccatggttccccacctgcccactcgtctgcccaccctcccctgagtggaggcagaggagctgagaacggcctgccggccagccctgggaaaaccaggttccttatggtctgctcagccatagagccggaggcccctcccagcagcccctgcctgcccactctgccagagcttctccatgcaacttttctgcagcatagtcctgttgcacaaacacctctctctgctttttcctttcttttttttttttttaatttaaccatatctgctgtatcatacaagcactcaggatcttggttgcaatgaatggaaacctatgctaaataactttctcagagggctcttggggctctggaaaccagacagaaggctggagaatgagggctgggcataggcaggtccagggaggccaagagggcagcctggctgtgaggcagctgctggtacagcccagactgtccctgcttctgggtcacttgctccagacccaaagttctgcccaggaatgtctggtggtcaaactccagccatgtggctccctcttttcagaggtgaactcagtcttcactgataagggtaaggttcctggtgaatcctgcagcttgaatgtccatccccatgaatccgagctgagcctgcagggctcccagccccaggcctccacggagaggagatgagccagccctgctgagccctgcccaaactgcacatgcgtgagttaaagaaacggctattactgtttaaagccatgcagtgttgggctggtttgttaaattgaaatagattacccaggctaggtgcagtggctcacacctgtaatcccagcattttgggaggctgaggcgggtggatcaattgaggtcaggagtttgagaccagcctggccaacatggtgaaaccccatctctaccgaaaactataaaaaattagttggtatggtggcatgcacctgtaatccgagctacttgggaggctgaggcaggagaatcacttgaaccaggaggtagaggttgtagtgagccgagatcgtgccactgcactccaaccccagtgacagagtgagactgtctcaaacaaacaaaaatcacccaacaccacagatgatcatcaagttcatgaagacggaccttcagtttgcaggggctgtgtgtccatttcattggcttgggtctccttttttatcctcaagggactcccaggtgttccgatgccctggcactgaggactcaggccatgccctggcccacaccctgccctgcatgtgttgcagcctgaagtggtccactgggcctggcatgtctcaaaagccaaaagggaacaatgcttcccggctccacattcagtgacagcacgtcagcagctggaagccagcatcagtgggggtgtttacaccatgggaatgggcccactccacagactagcgctgtaccaagagagccagtttggtttctgggggtcgtggggttaggtcctcatgcttctctcggacccaccccctagaaatgtccccacccaacccccactgtagcctggatggacggggatgagctctgcggggctcccgcctgagccatcttgtcttcagctgcgtttgggctctgagctccagccatgctggctccatgacccaggatgggattcatgcactaacgtgaagagagcaatctcctgaacagaggaaggagtgggccctggaggagccgtggccctgggtggtggcaccaggcagctgcaggaccaggggcagcggtgaggcacgaagcctcagactgggtgtggttcccactcgttcttgccggagaaacctgccttttcaagcataattcaatcaaaaggccttttgtggagcccaaactagaaggctttgggttccagcactgtgcctcagtttcctcatctggagcataaggatgggaccgtcactgggtgtagatgtggggtcccgggaggcgtgcaagggccatgtttgggcaggtgcctggaatggaggaggccttggtaagtaagcattcatgagcgaacctcccctctgccggctcacatgtcccactccctcacatgtgggccagtgtgttgtcaccctctctgcagtgaggaaactgaggcccagcccaacggcagagccagcccagctgtctgggcagcccgactccagagccgggcagggaattgcctcctttcacgttcagggtgactatgccagtgctcacagtgacgggtgggccggggccagctggcctagggtctgccttgccatctggcgacaccatatcgctcttccatcctggcatttggattttgttaccaacagcttcaccaaaccgcctttcatgacacccaggacagccacgaggctgcccctgcccctgccctgcctcagtgggactcacagcagctcagaggctggagggaggtctggaagcccctagtgctcagtagagcagtgagatgggagagaagcagctggggaaggaggccaggtgagcctggtgggaggcctctcagtttctgcacacttgggaacattccagagtgactggcatttcccatgactttctctgggatgaagtgaggctgagaatgtgaagttcccaagggttacagacgcttactgttgcagacacaaatgactacgcattccatcacgggacagttttcctttggaaagagaatgacccaatttcctttttttctaaaacttaagtcattctgccaaatttcaacatcctaattttaaatcactggtagaacctcgatcctgaagtctatcttggcctcactacaagacccccaaagagccgtcatccctgataaggtggttttaagttttagtgattgttattttgcaattcttagattttattcacaaaatccacgtggactcaattctagctcaagccatctccatgtccccggccaccactgcctgcctgcccttccctgtttatgggtctttgtttggagtcacctcttgtttgcctcaaataattaattttgagttgctttttcgggaaggaaatgttcttggtgcaatttctggcctctatgtagctgagaatgttttttctgttgcctggactggtgcagcgggtctccctatagtgacccggccaagcacagaagtctgggtttgcagctgtgagactccagacatcaccccatggtctcctggcgttggtgggtttgcagccatgaagctccagctgtcgccccatggtctcctggcattggtgggtttgcagccatgaagctccagctgtcgccctgtggtctccgtggtctcctggcacaggatgctgctgggctactcagtttctctctgtgcttgtctggtgttttatgcttgaagtggaagatttccaccagattcattttcattaattttgcttgtccccgtgagccgtttgattaaatagattcagatctgtcttcattctagaagttccttctcttacatactctatggctgcaccgttccggttgttcgagtttctttatctggaaaattgctccttcgcccagcaggtttctggcttccgtcctccatgtctgctttctctctcctcatctctgccttcctcctccctggggcatggggtgtggggcgtggggctgccgccgcctgtgtctcggcctcctggtccggctctgtgcttgtgggtgctgttccttcagctcccagtgccttgaaagctgccgctgggtctctcctgagatcacctcctcacacctgccctcagctaattcatgcccatccaccagctcctgttccattcccgtctgtttcatctgatgtcccaccagctcctgttccattcccatatatttcctctcaccagctcctgttccatccgcatctatttcatctatttcatctgactcctcaccacctcctgttccattcctgtctatttcatctgacgtctcaccagctcctgttccattcccgtctatttcatctgatgtctcaccagctcctgttccatccttgtctatttcatctgatttctcaccagctcctgttccatccctgtctatttcatctatttcatctgacttctcaccagctcctgctccattcccgtctatttcatctgatgtctcaccagctcctgttccatccccgtctatgtcatctgacttctcaccagctcctgttccatccccgtctatttcatctgacatctcaccagctcctgttccattcccgtctatttcatctgatgtctcaccagctcctgttccatccccgtctatttcatctgatgtctcaccagctcctgttccatccccgtctatttcatctgatgtctcaccagctcctgttccatccccagctatttcatctatttcatctaacatctcaccagctcctgttccatccccagctatttcatctatttcatctatttcatctaacgtctcaccagctcctgttccattcccgtctattcatctgactcctcaccagctcctgttccatccccatctatttcaactatttcatctgacgtctcaccagctcctgttccatccttgtctatttcatctgatgtctcaccagctcctgttccatccccagctatttcatctatttcatctatttcatctgacatctcaccagctcctgttccatccccagctatttcatctatttcatctgacatctcaccagctcctgttccattcccatctatttcatctgacatctcaccagctcctgttccatccccagctatttcatctatttcatctatttcatctgacatctcaccagctcctgttccatccccagctatttcatctatttcatctgacgtctcaccagctcctgttccattcccatctatttcatctatttcatctgacatctcgccagctcctgttccattcccatctatttcatctgacatctcaccagctcctgttccattcccatctatttcatctgacatctcaccagctcctgttccatccctgtctattcccgtctatttcatctgacatctcaccagctcctgttccatcctcgtctatttcatctgacctctcaccagctcctgttccattcctatttcatctgacatctcaccagctcctgttccattcccatctatttcatctgacatctcaccagctcctgttccatccctgtctattcccgtctatttcatctgacatctcaccagctcctgttccatcctcgtctatttcatctgacctctcaccagctcctgttccattcctatttcatctgacatctcaccagctcctgttctattcctgtctatttcatctatttcatctgatgtgtcaccagctcctgttccattcccgtctatttcatctgatgtctcaccagctcctgttccatccccatctatttcatctgatgtctcaccagctcctgttctattcctgtctatttcatctgccatctcaccagctcctgttccatccccgtctatttcatctgacgtctcaccagctcctgttccattcccatctatttcatctgacatctcaccagctcctgttccattcccatctatttcatctgacatctcaccagctcctgttccattcccatctatttcatctgacatctcagcacccagtgcctacacttaatgatttcctgaatttttccagtgaaactagcgcctaaatgtattctttcttccttcagaaagtgtttttaatccgcaggttgagtactgtgttttcctgatttgataaaacagaatatttttatagctctgccagttttccttttcttcctcatgaataatcagtgtgattcagctgggactttccctgttgaacagggagagtgggtttttccagcctctcctccttttcactccgctgtggttgaactcctacttactctttcggcagatggtgtttgccaagttagttttgcagctgcctgggggtactggggtggaagcagccccgggaaaccccatgggggactttgtgtcttttactccatcacagcgaagccacggggctgggccaggccctgccctttgggaacgggctcctccggtgctggccttggccttggccccacttcatcctggcccctgcccaggcttccagcccctgcccacagctgccccctccaggggctgccactgtccaggtcagggaaggctcttcctacctggggagaggacgccctggccaggaactgtccctcagctttctgtggtctctgtgtcccccgtgccctccgggtgccctgctggggccctgcctccccttgtcgctcagccttcatggtaggggctgcgggtcccagcgcccctcctcctcctggtcactcacctcccactgaagcagccccgtccgcaccagtgtctgggaaaccccagtgaggcccctccctgccagaccccaggtgtgggggcttctgctccacctgctgcatctgccacggggccctttggagaaagtgttttacccaaagaggcgagtcctggtgatgctggagcctggccctcattgctgtcagcccccagcacctggtacaaaggccactcatcccagtctctgagccctgaagacagcggagggcagcctgagacacaggaccctctcccaccagctccaggggccaatgccagcctggccagcggccgggaccagcacagaggctgtggatggggagggtggtgctggaggcagggggcatgctggcggtcttttgggggtggtggacagccccacaccctgcttgcaatggtgcgtcaggcagtggcccctggtgccggctgcttccccagcagtgaccttggcttctcttctgcaagcccctgcctgccccgagatgccaagccccaggatccaccagaactgccctcgctgcctatggccccgagcgcccaccctcggggctggacctttgcaggaggacaagccatgccggcctcaactagcggagacctctgtggccacctacgggtcctctgcactgtgcgtggggcagtggggacggagcttcctgccccccggggcctgctctgctcctgctccttggacctggaggagccatatccacacagacatgcacgacaaatgcggctgcagacacgcgtgatgaatgcagcatgacaagccagacccaggatggtgcctctccccggacaggagcactggcccgagcctggccctgggtgagctgcacagccgttccctgcctcgatttcccatctgaaatcagagcactccctccacaggctggcgcgaggactaagatcggggtagacccgtgaccctaggggagggtccccacaggcatgagctccttggctttgtttcacgacgatcgtgaacaccaagcaggcgtaaagcatcccgcagcgtttaggccctaccagagcatagccttggctgatgtggtcctcacccaccgtgcctggcatgacatctgccggcctatgctgagaggccgagaaaggatgaggggtggggagggtattctctgcatctgccctcctgtccacgggacaccgggccctgacctctgacagaggtgagcatgggtcccaggtgggcccatccgaagcctgcctcaggagtgtgaatctgtggctagggccactttcccaggacacctggacatcagctggctgaggtccccacccctggaggctggatcagagggggccagaggggaaggaggcagtgtccagcccctgagaggagcagggaggagggatgaggccagagtccgaggctggcgggccacccgggggccactgctccaggcctggtttgggatcacagatcaccctgctgacacgctccctgtcagcatctgcacggaggagtttgctggctgtggcctgcagcccacacatcccaaccacagacacgctctttccccaccttttggtccctctaacaactcaatgcccagaactttctattgcccaggactctcagggtcccttcggaggccggacagaccctcccctccccaggccttcgtgcagcccctgctgcatgccaggcccaccttggtgaggctgtgtcgggctgagctcctggtcattctgcagctggctgggcccagctccctttccagttgccctcaggccacccaggagcagctgcgtaaggattgctaagcctgagttatctgcatctttcttctttcactaatttctttcttttttttttttttttgagacagagtctcactctgtcacccaggctggagtgaagtggcgtgatctcggctcactgcaacctctgcctcccgggttcaagtgattctcctgcctcagcctcccaagtacctgggattacaggcacccgtcaacacacctggctaatttttgtatttttagtagagacggggtttcactatgttggccaggctggtctcaaactcctgacctcaggtgatccacccgcctcggcctcccaaagtgctgggattacaggtgcgagccactgctccttgtccactaatttctttttcatgctgatagatgtcctgttcctgaaccatctttgcatttctaaaataaaccacctgcttgggggtggtgtgtgatgattttgacacattggtagtatatttttgctaatattttatccaaactgtttgcatctataggtacaagcaacatagctttatcattttatatgctcccccccaccacctttttttgttttgaaatggagtttcgctccttttgcccagtctggagtgaagtggtgcaatcttggctaaccgcaacctctgcctcccaggttcaagtaattctcctgcctcagcctcctgagtagctgggattacaggcacatgccaccacacctggctaattttgtatttttagtagtgacagggtttctccatgttggtcaggctggtctcaaactcctgacctcagctgatccacccgcctcggcctcccaaagtgctgggattacaggcttgagccaccgcacctggccctatatgctcccttgacaaaagctatgccttcataaataggaggtttcccatctttttctgtggcctagaaaagttagaattatctttttaaaggttaaataaaattcaactggtctgcactttccttaaagataaatatccatcacctttctaatttctcctgtggaaggcggactattcgaatattccagttcttctaggattgagtttggtgatttctattctgctggaaaagcagccctctctgttttcatggggatggacttgactgtcttcatcagtcccaaaagtcccagggtggacactgctgcccagcctgggtgagatgctcaccttcagccacgtctcgggacaggagctggggcaggcaccagcctgggtccaaggtctcccgggaccagcctaggtggccacgtggccgccctgcaggaaggatggctctcccttgtggtgctggggaggtgacttccatgacagcgactgtcacggacacttctgggagagatgagaagggaacagatgattttggagccgttcaggtttcacacacggttttagtcccaacattgcagtcctcatcggcaaacgtgatccctcccccaccgcgttggaacattctgtaccaggttgtatcttattgtttgaaaacaagttctgctagttaattggttcgggagcagcacgggtaagtaacctccccatcttcccaacttggaatgtctgcctctttgtagatgtatcattgttgataggctttttattaaagttaaattccctttatgtttttaacgtttgattataatttaatgtcttcatttttctttttaagcatttcaaatacctgacaggaaacatttgcaaaacagacagccagacttgtcaaacacttaaattactcttatccttttaataaatcaagctcatagcaaaccaaatgcacttaaacattctaatagcttcacaaacttagttactgaacatctcccagcttaaagttataactctaatagaaataatacattatccctaaactgtactttaaaaatgactatgcactttgggaagctgaggcagtgggtcacttgagaccagcctgggcaacgtggtgaaaccccgtctctactgaaaatacaaaaagtagccgggtgcctgtagtctcagctagttgggaagctgaggtgagagaatcacttgagcccaagaagttgaggctgtagtgagtagtgatcacaccactgcactccagtctgggcaatgggaatgagaccctgtctcaaaatagtaataataataataataataataataaataatgactgatacaaagagttggctcactgaattatttctagtaaatttttgtttgtttctatatagtatggtttattgctgactttgacatatctgtaaagaatttaacattttggccaggcacggtggctcacgcctgtaatcccagcactttggaaggccaaggcaggtggatcatctaaggtcaggagttcaagaccagcctggccaacatggtaaaaccccatctctactaaaaatacaaaaattagccaggcatgttggcaggtgcctgtaatcccagctactcgggaggctgaggcagaagaaccacttgaacctgggaggcggaggttgcagtgagccgagattgtgccattgcactccagcctgggtgacaaaatgagaccttgtctctgccaattaaaaaaaatcatattctgggccgggcgtggtggttcatgcctgtaatcacagcattttgggaggccaaagcaggagaattgcttgagttcaggagttcaagaccagcctgggcaacatagcaagatctggtctctatatttaaaaaataataataatcatggctgggcacggtggttcacacctgtaatcccagcactttgggaggctgaggcaggtggatcacttgaggccagaagtttgagaccagcctggccaacatggcaaaaccctgtctctactactgaaaattagccgggaatggtggcacacgcctataatctcagctgcttgggaggttgaggcacgagaatcacttgaacccgggaggcagaggttaaagtgagccaagattgtgccactgccctccagcctgggtgacagagcgagactctatctcaaaaaaaagtaaaaataaaataatcatattctgcatattcatcccatatcagatacacaatttgcacctaccttctcccatttcatggttgtgttttcactgttcagtgtccttggtgcacagatggtttaaatttaatgtttttttctgttgctgcttgtgcttttggtgtcatatcctagaaatcactgccaaaagcaatgttgtcaagcttttcccctgggtttttgtctgagagttctatattttttgctgttacattagggttgttggtctgttctgagttagttttggtacatggtgtgaggtaggggtccagcactattctcttgagcgtggagatggtgatgggcttttctgagaagaagtagttacccaggatttttccctgtagatggctctgtgttcttggtttgctttgcctctggctgtaaactactggcagagcagactgtggacatgagatcaaatgaaggtttaatgaagaccatttgtttaaccttggcttggatttgcaagtaaacagacttagagacagacccagacatctgaaaccacttgattagtctatgaacaacacaaattccacacacagatggaaatttgacccttggaaacttaccttatgtgctgccttatcctcagctcctagcaggctcaatactaacttggaaaatggaaggattgtgggaatcctgcatcgttgctgctcatggactctacccattcctagcggtttagaggctacccagccggctccttctgcctggcctccctctgcctgtctgtccgtccagccggcaacaccgtcctcgctcctgtcctctggccacggtggccctatcccatggcgtcacatgggcacacatctctgtgttcgtcatccaggccaggagcctcttgtctactggccttgggacctggcttgctgtgtgctctgggcctgggagcctccctccatccatagactcaggccgtgcttatgccctgtgctcacatgtgtgagggggtctgcagtgcacgtgtgatggggtgtgtgtggcactctcagctgcccttcctgtcttctctcccccgagcctaggtagtcctccaccatgttgggacgcagggccccaataagagggatcttatttctcctttgcttgtgaagctcaatttggctggatatgaaattctgggttggaaattattttctttaagaatgttgaatattggcccccaatctcttctggcttgtaaagtttctgctgagaggaccactgttagtctgattccactgctgtcccatcagtggcacagggccctccatgtccttggtgcacattggccccaagggacccagacaaggtggggctgggtgggggctggcgtgggctgtgtacacccaggtcgagctgagcctggcccacattgggcacctacaagtcaggaggacccccacccacctggtacttacacatcaggggttcccaacccccgggcctcaaaccactactggtctgtggcctgttaagaacggagccgcacagcaggaggtgaggatggggagcagtgagcattccagcctgagcaccacctcctgtcagatcagcggccacattagagtctcataggggcgcaggggagggatctcaattgtgtgctccttatgagaatctaatgcctgatgatctgagatagaacagtttcatcccaaaaccatccccctacctgcatccatggaaaaattgttctccatggaactgtcctggtgcccaaaaggctggggagtgccattgtagagcacacaagaagctctgtgatttgaggcatcaggatggagatgagggacaatggtgttatttcaaaaggctgcatgctgtttgtccttcttccctcaggacgaggtgtgatgagccagaaagtctgatggggcttcccagcactatcctaagtcctcctctgtagggccttgggctgcctctgggccaggaggccaccactcggccagtcccccagaccccaggggctggggctgctccctgctgggctgtctggctggctttccctgcctgctctgatggtgagtcattctgggtctcacttgtgactgagtggcttcaggacacaggacacagttcacatctcagggctttaggctctgggctctctctggacatctaggggccagggagggacctcaggcctttgtaatgggaggcgacccttcttccctggacacacagctgaaaatagacacccccccgccaccgtgcatgagcacacgggggtccccacccaagggtgtcatgtgataggatgagggcagggatacacagctcgggctggtggagcggggtgggtctgggcagaggtccctggtgctggcctctgtgtttggcagagatgcaaaggcaggcagggaggggaagcttcggagtgggagagcggaggcacaggtgtgccctgggaaggcaggcggccaggcgtgggggtggatcaccagacagcagggttcctatgggattggtgagggctgcacagtggctttctctggttggtcctaagtttaaagcgaagccgggtgcggtggttcacgcctgtaatcctaacactttgggaggccaaggccggtggattacttgaggtcaggagtttgaaaacaggctggccaacacggtgaaaccccatctctaataaaaatacacaaaaaatagccatgcgtggtgccaggcacctgtaatccctgctactcgggaggctgaggctagagaattgcttgaacctgtgaggcagaggttgcagtgagccgagatcacgccactgcaccccagcctgggcaacagagcaagattctgtctcaaaaaaaaaaaaaaaaaaaagtgggagcaaaaattagggaagctaattaatgagtgaattacatttgtcatttgatgtattaatccagtcccagctgtttggagctgatggtaacaggagctgttgtttagcttcctggatgctctctggagatgacagtctcccttcctatgactcaacacagcaggcggcctctgggctgcttaccagggatgagggcgacctcccgggctggttatgggggcaggggggaggcctcctgggctgggtgctgcagatgtggggtggagttccatttttatagctgggctggccgctgtccatgtgcacattcagtctctaacaactaaaatttctcatcgtaagtttaagtagttgcaaaggatataacttctgatatattataaaaccaatatgtaagaaataaccatgaagtcactcttttaaatgtattcaaaaccccagtgatttgatagccaccattatctgttttaaaaatacaggcaagctgggcgtgctggctcatgcctgtaatcccagcactttgggaggccaaggccagaggatgacttgagcccaggagttccagaccagcctgggcaacatagcaagaccccatctctatagaagtaaaaataaaaaattagccatggtgtgatggcacggggctgtggtctcaactacccgggaggctgagatgggaagatcacttgagcccagcaggtcgagtctgcaggaagccgtgatcacatcaccgcactccagctgggatgacagagcaagatcttgtctcaattcatccgtccatccatacatccatgtgtcactcagtttaaaagaacaaaaaccaaagaaatctgaaaagcttacaacgaaaagacgctcagtattctcttctcctccctggattagctgggtgggcgccaggtcatcacagggtccttgtaagaggaaggcaaggggtcagagtcgggcagaggaagccaaggtcagaggggaggagaggctgctgactttgaagatggaagagaggcctgagccaaggggtgcagcggatcctagaaatggtaagagggacacagatcctcccctagcgcctccaggaggagtggaacccagccaacacctggatcggagcttctgacctccagggctataggagaataaatgtgtgttgctgaagccactgactagtcagctactgcaaccgttggaaactacagctattatcacaatgcccataaaacacgctccagcagcgtgagaacaaagacagttgtgtggtggttatgaaacctcacctaacaagaccatgtttaagaaaagccaaataaaaacaagaagtaattatttaagcggtatcctaataaacggcttgcaaaaatatgtgagcaaatgaagtggtctccatccagaaccttgatgctggtatttattttgctacttaagagagtaagagggccatttggatcgtgtcatggagggtgtttcgacatcatgttcctgctagcagttgcagaggcaacacactggtccaggctgtgcatctgggctccaggccgcttcccgtggggcagggcagctgctccaggaagaggctgagagctggggtctgggtgactgggctgggatctgcgccgggtggggaggagaagcccaccgcactggggttcaggggttcccagaagaggagaccaaagccatgcatggtgctttgcagcctgagtctgagctgagctggtggggggaccccaacacaaggaggacgcaccgggtcacaaggactgtgctcgctgaacgtcagggacagggtgggccctccttcccaaagccatcagtgctccccactgggccagtgtctggctcacagctgggagagctgggaagggcttcatgggtcatgggcacccaccaagggcagtgttgctgaccatatggagccaggaaaaccaaagttgcacatttttttttttttttccagaacacaagattcccttagagtgttgttcttcacggttcgtgatttggttcaattgttaccattcctgatgcttcctcctaggaaacaagagtaaaccacaatggcctgtaaaacaaatattaaaatctcgcatgtactcttgggacagacgtcgtcttgagtgatggccttcccggccctgaccaatgcctgtgcacatcctgagtttgtctgagagccagagaccccctctgagaaatgggatggctccagctgggaagcccccgccctgccaaggaatgtcacgagcctcaagcagatttgctcttagatatttctttttaatcgagtctaacagtgattgttgagccgtccttcatttttttttttttttgtaagatgcctctgtcaagaaggagccacgagttggctttcatggaatgggtgctcttggtggccaaatagaaataaaacctggctgtctggtcctgatccactcacagaagtggcgtaaacaccttatttatgatctgggacattcaacaccatcttataaaagattcatagaatacacattcacacacccacaaaaatcaagagagcagattttccaaaaataggtgcaagaaagatccaacttccaggataaaattttagaaccaacatttccattagcaaaagcggtcttgtctaaaactctaccgaccgcgctaaaatcccattcaaaacagagctctggttacgtagatcgtgatcaataatgagaaactgtgaggcgtccccgtgggatctgacacttcctaggggagcttctctccactggtaataaagatataattaggaatttcaactacctgtgattttgccaacttacggcatttgttgagaatttcggtccctgtgtttatgcacacacctttcaaccttagatttgacggtgatgggttagtaaatgtcaattctaaagtggtcgttttcaaccaggggcaattttacccctcaggggacactggcagtgtctggagacatgtttggttgtcatgacttggggcagaggtgccacgggcacctggagggtggaggccggggtgcggctcaataccctaaccacacaggatggccccaggacaaagatgcccctggtgctgagagcagggccctgttctaagagatgggtggctggagcctggctggagggcactagtggcactctgggctggtctcccagggccccatctgccaggtcgggggcccacgtgggcctgcaggatgtgcgtgcttctctgctgttgagattgcatcagcacaacagccacagccgtgacacgggggcaggcacctcagtgacgccagagtcggggcgggaggtgtggagatctgggcttgcttcctcttttcagtcccaggacagctcctctttggctgtgggaggcccagcttcagccttgtctgtggcttcctggtgggaggacacaggccttgagggacgtttgtccgagacggtcctcatcctactggtagggacacagagcacctgttcctctggcccctccaggagcaagacacatgcactgctgaggccttggaagcctacacaggtttatcacccacggccagacctgtctgtcagggagcaggtggggtcatcctgccctgaagcaccgatgagctgatcccggtcatgcagagtgggtggggacctcttggctgggcctgttcatgtagcacacacggctttgctgcccatagaatccagggcccccagtgtgagcaccactctccatccctgaggccgagccttaccctggaggcagcctcaggtgagatgcccctaatggagccacctggcaatggaccgctctcaggtccttcagctcggtgcactcacccgggagccctgcgttctgtcctggggtagaggctcagggttggtttgaagccatatagtcagctcccagagtcacagaaacgtccaaggaagaaaactgtccgattacagacttttaaaattcattcatagtttaatcaagagaacttgctgttccttcctcaaatttcctagaattggtcttctcataatcaccacctagggcacagctgtggccgaggctcccatgatgaagcgtctgtgtcagcgctgacgaggtctgccgaggacgcgtttctctctgcagcccggcaccagtctcaaggccatcggctccgacagcgtcacctcctgggaccttcccttcatgtatggtcccagcggcatgcgggcctggtggaggaggtcctggcctgccgcccagggatggccggtccaggcgcagggccgattgtccacttctggcccctgaggtaccgggagggctggtgagcagcatgtctcgctctgagaccggccaggctgctggggcaggcatctgatgtacagtagttcccacacgtggcaatgtcaccagcaagagccacgtatgataaattcaggccgtccaccgtggcaacactgggaaggctgattctgtaggaaaggattggccttgggccatcactgttcaaagaagaagaaatccctggatcactgtctgatccaactccagacagacactccacacaggattcctcctggggatcacggctcttctcttggcggagaagaaggagggagaatgagcccatgtcgggggcctctaggcagcccgccacagccctacaactcaaagaaaactcaccagtccctggtcactcggatgtccttggaggcgcttggatttactgcagggaccccaagagtcggccacggcagagccccgtctgccagcccaccgaggactcggggaggggagggagcactgcagcagaacggaaaatgggtccacgctcagcttcttggtttatcattttagactttatgcgttggcttcctgcgacaaatggttacattttaacccttttacaaccacatttcctcccccaatcctctcaatgtcatgatttttcttttttcttttttcttttttttttttttttgagacggagtctcgctctgtcgcccaggctggagtgcagtggcacaacctcggctcactgcaagctccgcctcccgggttcacaccattctcccgcctcagcctcccgagtagctgggactacaggcgcccgccaccatgcccggctaattttttcatatttttagtagagatggggtttcaccctgttagccaggatagtctcgatctcctgacctcgtgatccgcctgcctcagcctcccaaagtgctgggattacaggtgtgagccaccatgcccggccatgatttttcttttggaaatggagtctcactctgtcgcccatgctggagtgcaatggcacagtctcagcctcgccgcgccctctgcttcctggcttcaagcaattcccttgcctcagcctcctatgtagctgggattacagatgcgcgccaccatgcccagctaatttttgtatttttggtagagacggggtttcaccatgttggccaggctggtctcgaactcctgtcctcaagtgatccacccaccttggcctcccaaagtgctgcgattacaggcatgagccccacgccctgcctccttgtcatggcttttactccacagtgtgtatgccgttgaaattgaataaatatggattacaacagagaccactgttgtgctatgattacatttgtcaacttagataacagagaggctctgtgaaagaaaacgacatttattcaaaaatagggcgttgcagtcggaacacacgtgcggtggtagactgtgtgtgttcagggaggtaaagggagaaaaaggcttttaaagggaaaacgaggatcacaccgttgttttgaggcgattccccttgtctacaagcatcagcggcggggggtgccagtccagggttggaccgcagttgctgggcagatgtcctcacagtattttctgtccatggttgcagtggacttcatacagcgttgtggtttctcagtattttgtgatagtaatacaagagttattaagaaataatttttatgccgggtgcggtggcgcacgcctgtaatcccagcactttgggaggccaaggcaggcagatcacctgagatcaggagttcgagaccagcctggccaacatggtgaaaccccatctctactaaaaatacaaaaattagccgggcgtggtggcgggtgcctgtaatcccagctactccggaagctgaggcaggagaatcgcttgaacccgggaggcggaggttgcagtgagtcaagatcacgccattgcactccagcctgggggacaagagtgagactgtgtctttaaaaaaaagaaaaaaaagaaataatttttaggcagctggatagggtaaaggttctaggtggaaactaacagaaaggcggcttaaagagccagaccagcaagctttgatatgcaaacgccggcaaatagacactgggtctacccaacatggcgattcccacatcttcttgtcgacaggtgtgccaggtgtcatggccgcccccacataacaccatgtgttcaaaacgtcatggcaacccacatttgcatattaaaggactaaggtgggagggccaggtttctcatggactacgtgaatgatacacccggtcaaaccaattccctgccccctatgcaaaccagacaccgcctcctccagcctcccgctatcgtggaatgcccttctgcggcatgcggggcctctttgctctgagccccactgcgtctctgtataggggagctgttttattctttattccttcttccttgcctattaaactttctgctccttaaaaccactccacatgtgtccatgtcgttttatctaaatcggcggaggaccaaggaccgtgatgttcctccagtcattggagccgtatcaatagctcttgctatcagtaattcatgcaggagaaccctccctttatggcctcccccagcgctatttgtcagagtatatgtcgcccgggctggagtgcagtggcatgatctcagctcattgcatcctctgcctcccagattcaagggactcttctgccccagccgcccgagtagccaggactacaggtgccaccatgcccggctaatttttgtatttttagtagatacggtgtttcaccatattggccaggctggtctcaaactcctgacctcatgatccacccacctcggcctcccaaagcgctggtattacaggcgtgagccactgcgcccagcctatttgtcagaggcttttttttttttttttaacagaagtgactccattttaattctgataactttctcattgtcccctttttaccaaggtctttctttgaaagaatcactgatcaattattctattgttaggttttgattgtcccttgttggtgctgggatgtggtgtcctgcggttgctggtcttgtcccacagtggagggaagtgattagcagctagaagtcagtggcaaaacctttagccacatttgaacaagagagatttgaaaggaatgtctctcaggctgagtctacctggagtccattattaatttcagttttatttgtttcatagtctttgctatcatctcaaagagccggtccagcattgttcagttaggaggtgtacatctgcagaaatttaacaagtaacaggcacaaagtttaaaaagggaaaatacaaagtaaaattaatagtaatatgaaaatcccagtttgcataacagttttgagctacaaacctaggcttaagatcaccagttgaatgaactaaatgaccatgatcctgtggcacgagcaggtagacggtaagagggagggcgtctctgatacagaatctcgtcccgatgaactggaagccctggctacagtgtgaaaacgccagcttctctgcctggtttgcaggtgaaatgtctgtggttatggcattggatggtttggtgaactcctgtggggcccatatgtcagatatgagacttgttccttaaaattcatctagtttcagtttatagggatttaggaacagagcagtttttatttttagtaattccatggaagaaattttgactgaaggaatctagaagaatttaggatctagtctagtctgtaggtagatataagagctcaaatacaatgcccagagctacaatctcctaacagatgtattatagcttttcttttcctttttcaaaaagtatagagataagggtctctctattttgcccaggctggtctcgaactcctgggctcaagtgatcctcctacctcagcctcccaaagtgttgggattacaggcgtgaggcactgcacccaggcctacagcttttctttagaaacataagcttttctccctatgttgatcagatgggaatctcagatttaatggcctcttgaggctaagaagccaaaccaaggcaggctttagatttgaccgatagccctgaggttcctgggcctgccagatggtgacagtttttatttactctcgctgtaaggctgggaactttctttttatttggaggggggatggagttttgatcttgttgcccaggctggagcgcaatggcgcgatgttggctcacttcaacctctgcctcccgggttcaagcggttctcctgtctcagcctcccaggtagctgggattacaggcggctgtcaccacgcccagctaattttagtatttttagtagagatggggtttcaccatgttggccaggctggtctcaaactcctgacaccaggtgatcttcccacctcagcctcccaaagtgctgggatgataggcgtgagccagcgcggccggccaggcttggaacgcttgaggcacattctcagagacacgatttcggtcacagccttggtaatatgactggtgttttcagttgtagcctgtcatgaaaagagattgacacattacatttttgatactaccttacgtttttcctggccttttgtttattttttatttatttattttttagagacagtgtctcactgtggacgtccagcctctggaactgtgagaggtacatgtctgttatgtaggctgcccaggctgtggaactgtgtcatagtggcctgagtgacttaagcacctgcctgtaggccaggactgtggctccacagcccagcttcaagcctggccgaccaggggtttggcatgaagaccccggcagggctggggctgtgctggaatccacccggaagtttcctgccccttgggctgcccaccaggtcccctttctgctctgatcaagctggacaaaacgtcgtggggccacagcacagggggccaacgcaagctgggatcgtcagacgttaggaaatcccaaggaagaagagaaaggggacacattcgggagacgtcggcacacgctcgaagcagcggacaggcacctctctgtggacaaggcagactgggcggccgagattccgcatagatgcctgcttcctccacgacctccacgtgtggctggcccagtccgggtccccctcacctcctctgtctgtcttggtggcctcacgccgtgggctgtgatgccggctacgctgcttgggtggccaagggtctgagctgcaagacgcccagcctgggtctctcccgagctctcccacgtcctgtctgctcctcctccgagctcccggttgactctcacgactgcaccagcctctcccccaggaaggcgtggaaacaacctccttctcccaggcccgctctgcctcctgcgtttcaaggcaaatccgttcctccaggagatgatgcaaccacatcctgttggagcccagagaagtgcggatgcagcccggggctctttctttcctagaaccctgcctgggagtggcttccctgaactaaggacagagactttgtcttcgttgcctctcggcctgtgggcactgagcatacagtaggtgctcagtaaatgcttgcaggccgatgcccagagccattagccctcatcatggtgagctcggcagccggtgttggggctgggctgggcctaggtgtgcgtgggggcggtgctggtctgctttgctgggagccatggacaccggaggaacagggccccatcagtgcggtcagagtgcaaactcggagcgtccttctctggaaaacgaatcgcagtggccccgatctttggggctttctgtgtcccctgtgcatggttagagaagagaaaacatgcactggtttcctgaaaatccctaggatttcttcagaggtctcagcttctgcccacagcctctggggagcagaccaggagccccgcagcacgggagtccccagacccaccctgaccacagcccaggaatcccgaagcagaggctctgggtcagcttctgcagacgctggagaaggcgggaggctcagggctgggcctccaggtgtaaccgcctgatgggctcttcctgcccctgcacagacaaaacctcttcactgggcccaaggcattgctataaagagtttaatagacaccaggctggccatgccacgtgggagatggagttattactcaaatcaatctcccccaagagacggagttattactcaaatcaatcatctcccccaaaattctcaggctcgggtttttcaaggatagtttggcaggccagggagtctgcttctgggtggggccacaggacccgtttgtggcgggcaggggggttggtgtgtccaaatccaggtggagccatcattgtcagaaatgcaaaaacctgaaaagacacctcaaaaggccgatcttagcgtctacaatagtgattcatcctcaggagtaattggggaagttgcaaattgtgtgacctccggaataatggctgttacaatttttgcaaaggcagtttcacagggatgaggccaggacagagggcacagcccgctgggactccagggctgcccctgcaccccccatatcagctcagagaggcctggtgtccccgctgccaggggttgacacccactggtaccccctgtggagcagctgtgggcgggggctctgcagggagggtgtcgggggggccaggtgagccagcccagagccatgcccgcacctgctgtgggccctggccagggcaaccgctgcctcttcctttgatgtccctaccctatgcccctctcttcaggcctgttctgcctgaccccgctacctccatccggctgccttccatgagcagcagctgcctcccccccacacccttccttggtggccccgcccctctgatctccgtgagccaggatctcccccaggatccctatttcccacgggcttttggcaatgggctgctcaccccctccttcccctcctcctcattcatctgccatctgtgaaatgtggaggaggggcctgccctgtgccaggatctgtgccctagacacttccccagccaggcccaagggctgagcgtgaggctggcaggtctgcacttgaggtggatggtgagggtgccctcgcccacctgcagccattgtctgctgagtacctgtggtgcagatggggatggctgcaggggggtctcagctcacgcagtattgcggccatgggtgctggacattggtaggtctctctgagcagagcccgatggaagtgagaagggcgtgcgttaggggagcatttggagagggagccacgggtacagctgccctgcaagctccagcgcccatgggaaaaagggaccgagggggagaggggaggggatagggggaggggaaggggatggggcgtcggtggttgcttgggctcttagggtgggggtgatgcctgcagtcttggtgttgaagggaagaccagggaagagggaaggcaggaggcctgggagagaaagggaagagctgttgggtgctggcggagtggagcgggctcttgcatcactccatcccaggctccaccctgcctgcacctggaggcctccctcacctggctcctctgtgctccagacccctcccctttccaggtccaggattccccctgcccaaacagcactgaccaggcccccagggcctgtgcctgcagcccccagggacgggtgggcgtaaaaagatacagcgggccaggcggctcacgcctgtaatcccagcactttgggaggccaaggtgggtggatcatgaggtcaggagttcaagaccagcctggccaagatggtgaaaccctgtctctactaaaaatacaaaaaaattagccggcgtggtggcctgtgcctgtaatcccagctactccggaggctgaggcagagaattgcttaaacctgcaggggtggaggttgcagggagccgagaccgcaccactgcactccagcctgggcgacagaccaagactccgtctcaaaaaaaaaaaaaacaaaaaaacacagcggccattctgggagccttggaatgaccctgagaagtgagtgtgagcatgtctggaacacgcagccgagcctgaaggaggactgggtgcctgcagtgggagccatctcccttctgggttttctgattttagcctcgcgctgcctttgagcgattttccaatctgtacattacagataacagagagcaatgcagataactcttgcttatagccacgtgtagtgggttgacagtggcccccaaaagctatgtgtaagtcccgaccctcatgcctatggggttgagcttatttggaaatagggtgtttgtagatgcgtcattagattaaggctttttttttgtttttttgttttgttttttgttttatttttttttttttaggcggagtctcactcttgttgcccaggctggagtgcagtggcacgatctcggctcactgcaacctctgcctcctgggttcaagcaattctcctgcctcagcctcccaagtagctgggattacaggcacccaccaccacacccagctaatttttgtatttttagtagagatggggtttcactatgctggccaggctggtcttaaactcctgacctcaggcaacctgcctgccttggcctcccaaagtgctgggattgcaggcgtgagtcaccgtgcccagacaaattaaggctcttgagacgaggtcatcctgggttatgcagatggaccctgaatccgacactagcacccgtgtggaaggaacgagagggagatttggggtccgcagaggcaaaccacaggaggacggagtcggagactggagcaccgcggccttgatcgggggacaccagggctgccggctgtgccagaaggggctgaggctggaccggattctctccgagttcccagaaggagccagtcctgccgacgccttgatgctggactctggcctccagaaatgtgcgaggacaaacatctgcggtttctaggccccgcctgtggtcctctgttgcagcagcctggacagtctggactgcctggacagcatgcagatgggctctgcccgcggctgcccacgagttcccaccgcccgcccgtccgtgggagagccagtcctcgtatgtgaagcgtacctgtatccctttactccgcgtacacaggtgcctttgtcacttctcctttgacctggctggcacatcttaccggtttctgcgctaacaatgagttgaaggaaatcttgaacgcgcgttcattttatatcggtatcagagtctgtttatttcttgttgacactaatctttgagcatgagtagtttagtgattgtgaaacagaaacttctggatacaaaatcagtctcctggctgtgacccaatcatcttcgcagttctgattacctgtgattaagaaaataaataagaacacccattgggggaaggcttccctcccccgggcacagcagctttaaaaccgaaagggaagtgggtgctgtgagcagctctgttcaggcctaaggccacgcatgtgtgccccgtgggggagacatgcaccagcgaatcaggaaacagtggtgacagccgttccgggaggctgactgggggtgcaggggtcacttttctaatgtgggtgggtctgtgtcccctgcaggaacgtggctgcagcaaagccggtcagccagcggtcagctccagcccctgtccaggccctgtgggtcctgctgaccaggctgcggttgttcccaaaccagttcccagcccccgcttgccctacttcctctcacaccagctccttccaccccctcacacccacctgcaggctcccagcccaggctactgacatcaatcatggcaatcgctattccagaggtatacgcggtgggtggggtccggtatcgcctgccatgcctcactcaccgggcacccagataacctgaggccagggagcagccactcgccctgacccatgctccccgggcccctgaggcacccaggaggaccacccggccgcttctgctcagagcccagcacccccgagtctgtgaagaggtcacatctgaccacgtttccaggtggctgcccaggcgtgggttcatggccgcttccggtttcctcctcgagctgaaccacacacctgctctgtcccgggctttctggaggggttttccgaagtgagactgtgggctccctccagggctgggggcaggaggacacacggggaaggtgggcaagcagccccaggctgagggaggcctcccctctgcagcgtttgttcattcatttgttcatcgctaacactgtcttgggcatcagggaaaacaggtgtctctggtccacatgcagaagagccaccaccgtggcacgactggatgactcagaccccgggcggggggtatgatttggacacagtcattgtccagggacacaactttgcctggaccagagcttctcacccccaggccatttgaaaccccaggggatactcgacaaagtccagagacattttgggttgttcctttccagccccggcgatggtggggacgtgtccatgtctgtgtccctccggtcactctctctggccctctccctccctgggggcagctgctctcagccctccctgcccccacatcgccatcctgcctgtccttctgggcctgcacgtttgttgtgtttggaaggagccaccaaggaggaggatgtcaatgtgcaagttctcagggaagcaggccccgcagcctccgtcagtgtcttccgtccgcaggaagaacccaggcctgggtgattcatcggggcctcagggccgggaggcactaaatcttctgcagatgtggtaagatcctatcacagcagaaagggaagggctagagtctcagggaaggttttgctagggagacgggcttggagggggctgaggctcatgggagctgcaagggtacaggaggggaggggaccccagggcaggtggatggacacctgggtgggtaagaaaagggcctctcagagggcaagggagggccagggagggagcagtgagccctgactgactgtacaagcttaactggctgcccttgtcctgcaggtggtgtgggctgtgtggatttcggatgtgggcccataacatagccacactgctgcaaagcaagtgagtctgaggcaagaagaaggcccaaccttgggaggctgacctggagggcaggcagaggcaggtggtaaggacctgccttacctgttgaggtgacagtgggggacatattgcaaggaaggaggccctggatcctcaggatgtggatggtgggtagaagggtgacagctaatggatgtccacctgcacagatgcccacctgcatgagtgcccacctgcatgagtgcccacttgtaccaatgtccacctgtacagatgtccacatgcaaatgcccatctgcactgatatccacctgcacagatgcctacctgcatgaatacccacttgcctgaaagcccacctgcacccatgtccactggcacaaatgcccacctgcacccgtgtccactggcacaaatgcccacctgcacagaagcccacccacacaaatgcccacctgcaaaaatgtccgcctgcacagatgtccacctgcatgaatgcccacctgtgtccacatgcacgaatacccacctgcacagatgcccacctgcacggatgcccacctgtacaaaggcctacctgcgtgaatgtccacctgcatggatgcccacccgcacggatgcccacctgcacagttatccatctgaacagccctctggtgcctccttttgcttgcacatgttcaaatcctcccagtcctacagtcgattgttcctagttggggtcattctgggcatgttattctaaaacttgttttttcccgtctccacatcaaaggagaaaggtctagcttgcttctttgctatagagcagggcctgagtgaggtcaggaccacagagcagaccctatgagtgttggtcaggacacagagcaggaccccttcagggtctggaagagggttccccaagctcctgttcaacctgagtgagaggctcaggctgcccccaacacactgcacagaaaaatgggccattgattcagagccacccacgctaacagcagttcagctgcagccctccggcaggcaggtcctgggaacactaggaacctgagaccctgtcccttcctgatagcggggtgtggtgacatgaggagagactgggtacctccattctgctcatgaaagtcacagaggggaccggggaccccaggcccctagcgataccagcaccccacacaatgcctttctgggatacacccccccaacatggcctgcccaaggcatcaggagctgtgtagaggagtcagctgggggtggcagagccccagggaacaatcatgggtcgctggcagataagccatgcgcccacacagcacaggccctcacccctgcagctgggggagccctccttgggagcgggcccaggatccgggcaaaatgacacagaccggatccaggagcagactgagcaaaagtggcaaaagtattctccaggttaagggaatattttcaccaattgagagaccagctgtccctccagacccaagggttccacatccctggaggcaaccaagccagatgcaaaatatttgaaaaagaaaaatgaaaaaaagaacaatacagcaataaaaaagaacacaaataaaaaatacagtatagctattgacagagcattgtgttgtgttaggtctgataagtgatctagcaatggtttgcaggatgcaggaagatgtgcgggagggtgggcacaggtgctaggcagacactgcgccattttattctggggacttcagtatctgcaggggtcctgggactaatcctcaaaggataccgagggacaacttgatgttattattttattttattttaaagacatgtcttgctatattgctcaggctgctctcaaactcctgggctcaagtgatcctcctgcctctgcctcctgagtagctgggactacaggcatgagccaccatgcctgacttatgttatgattttaaaaagtaatccatcaacctgaagagaagcccactgtccttcacctttggaagttcctacccaccatgggtaagatttctgcatggagaggccctgctcccccaacctctctcttgagtcccctgctcagctggcattccccacctactgtggaagaacattctgggtttctccgtcagccccaggcccaccccttggggagatgactggtgacttacatgtgtctgtctctccagctaggcatggtgccacagcaaggggtgtaaatactgcaggccacacattcccggcacccaggacaggagcaaacaaaaggatagatggttggctggctggatggatgaatggagggaaggagggagggatacaggaatggagggatggagggatggagggagggatgacggagggagggatgggtgggtgggagggatggatagatggaaggatggaaggaggagggatggatggatgaagggagggaggaatggatgaatggagggagggagagagggagggatggacaagaggtagggaaggatggacgggagggaagaatggagggagggatggatggagggatggaggaatggatggatggaagggaaggatggagggatagaaggatggagggagggaggaatggatggatggagggagggatggatggatggaggtagggagggaggaatggatggatggatggagggatggatggatggaggtagggagggagggatggatggatggaggtagggaaggaggaatggatggatggatggagggatggatggatggaggtagggagctagggatggatggagggagggagggggtggatgggagggagggatggatggatggagggagggagggagggatggacaggagggaaggatggatggatggagagatgagggatggatggatggagggatggatggatagatgaagggaaggagggagggagggatgaatggatggaaggatacaggacacaaggtcataggtttgacaaatgtcacctcctcagaagcctccctaacactcacagtttgataagtcccctgtttgattctctcccagagcccaggtcactccaacactgtctggtttacctgccttctgcatggcttgccctctgtctccaattcctggaacaggtcccaccacctgacacctgacatctgtcagggacacatgaatgtggaatggatggatggatgcctgtgaatgaatgtgggatgagtgaaaagtgagtgaatatgggatgaatgaatgagctagtgaatgtgtgatgaatgtgtgagtgagagaatgtgggctgagtgaatgtgggacgaatgagtgagtgaatgtgtgatgaatgtgtgagtaagtgaatgtgggctgagtgaatgtgggatgaatgagtgagtgaatgtgggccgaaagaatgagtgagtgaatgtgggatggatgagtgagtgaatgtgagatgaatggatgagtgggtgggtgaatgtgggatgaatgggtgcgtgaatgtgggatgaatgaatgaatgagtgaattttggatgaatgagtgagtgaatgtgggatgaatgaatgagtgagtgactgagctgaatggttgagtgaatgtgggatgaatgaatgagtgagtgactgaaatgaatgggtgagtgaatgtgggacgaatgaatgagtgagtgaatgtgggatgaattaatgagtgagtgaatgtgggctgaatgaacgagtgactgtgtgatgaatgagggaatgtgtgttgaaggaatgactgaatgtgagatgaatgaatgagtgggtgaatgtgggatgaatgagtgagtgaatgtgggatgaatgaatgaatgtgtgatttgggatgaatgaatgagtgaatgtgggatgaatgaatgagtgagtgaatgtgggatgaatgagtgagtgaatgtgggatgaatgaatgaatacaaagcccccccaccccccaggtgcttcagcagaacagtttcatgggaaaggagatgtcctggaccctgggcctcatgaagccaaccttggggcttcagctgagagtgttaaaaatagagaccgttaaaaaatttttttttaaaacaaacgaacggaaattccctttatcaaaaggagtcactgtcattgaattcagaaaagttacatgttcaggagctgagggccttttcttgaaaatataacacacctctctgggggcttccctggggacagcccgggagtgaggccagctgctcggggaagctgaggctgacatgggggtctgtgtccagggtgggtggggcctttggaaaacagtcatccaacagtcactaagaaagacactgacaattcattcatggattttgcaaataaaccatgggccccacataaaggattgttatttaaggaaaatgcccttggccaatttgtcctgaggattttttggacaaaacagcatttgtcagcgtggaacttctcaacaggaaatgcaaaaatccaaataaataaataatttgggctgggcgtggtggctcacacctgtaatcccagcactttgggaggccaaggcaggcggatcacctgaggtcaggaattcaagaccagcctggccaacatagtgaaatcctgtctctaccaaaaatacaaaaattagctgggcgtggtggcatgcatctgtagtcccagctactcgggaggctgaggcaggtcaattacttgaacccgtgaggcggaggttgctgtgagccgagatcacgccagtgcacttcagcctgggcgacagagcgagactccgtctcaataaataaataaataaataatttggagaaggttgtgggctcagggctggccatgggagagcaaggagtggtaggtgcggctaagcaggtgttccaaacaaaacacaccccaagcgcagccctgattttagagttcacagtttctgtcgtgtaaatgctccatactcctgctgtggccatttgtaagcttccagctagttctcaactagctgcaaaattcttgaatatttagtaatggtttccacacctggggacctgggcagggctgcaccaaggtgaggcctggggaagaccctcatgctccagcaagtgcagcgttggccccaggggtgagcataccccgcgttttcctccctggcttcccagattgtctcccctcacccattctggtggtggccaacgtggctattgccatggatcacaacccctggccagaccatcccatccccctgggcctctggctcctttcagtaaaatcacggtgggaccctgtctgtcgccataagactgctcccgtgaggtaactgttggtcacttcctttggcctgccatttgcacagcacaatggttcttctgagtgagtataagctggctgcatgttagatgtacctgggtcccaccccactgtcagaggtatttgaaccagagtgactccatcttaaataggcactgggtagaatgaggctgagacctactgggctgtattcccagggtgtcaggcattctaagtcacaggatgagacaggaggtcggcacaaggtacgggtcacacagatctcactaataaagcacgttgtggtaaagaagctgggtaaaacccaccaaaaccaagatggtgacaagactgacctctggtcgtcctcactgctccttttttttttaacattgagacggagacttgctctgtcacccaggctggagtgcagcggcgtgatctcggctcactgcaagctttgcctcccgggttcacgccattctcctgcctcagcctcctgagtagctgggactacaggcgcccgccaccacgcccggctaatttttttgtatttttagtagagacagggtttcactgtcttagtcaggatggtcttgatctcctgaccttgtgatccgcccgcctcggcctcccaaagtgctgggattacaggcgtgagtcacctcgccttgccttttttttttttttttttgagacctagtctcgctctgtcacccaggctggagtgcagtggtgtgatatcagctcactgcaacctccgcctcctgggttctagcaattcccctgcctcagcctcccgagtagctgggattacaggcacacgcctccatgcctggctaattttttgtattttagtagaggagacagggtttcaccatgtggctgctctttatacgctgattataatgtattagcatgctaagagacactctcaccagcaccacgacagtttataaatgccatggcaacatcaggaagttaccctatattgtctaaaaaggggaggatggccagatgcagtggctcacgcctgtaatcccaacactttgagaggctgagatgggcaggtcacttgagaccaggagtttggagaccagcctggtcaacatggcaaaaaccctatctctactaaaaatacaaaaattaaccaggtgtggtggtgcacatctgtaatcccaactacttgggaggctgagacatgagaatcttttgaacccgggattcggaggttgcaatgagccgaaatcacatcgctgcactccagcctgggtgacaaagtgagacctgtctcaaaaaataaataaacaaaaaacaaataaaggaggaaccctcagtttcaggaattgcccacccctttcccggaaagctcatgaataatttaccccttgtttagcatataatcaataaataaccgtaaaaatagccaaccagtagcccatacttctgctctgcctatggagtggccatttttcttattcctttactttcttaataaacttgctttcactttataaaatcgtcccaaattctttctggaaggaggtccaagtaccgtcttggggtctggattgggatccctttgtggtaaaacaacccttccgtaactgctgttaatgggaaaaaacagactctagaacattttacagaggtttattctgagcctgtacatgtgactgtggcctggagagaagcaaacccaggaagccttgagtgagtcgccccgaggcggccgggttacagcttgactgagtggccccgaggcggccgggttacagcctgagtgagtggccccgaggcggccgggttacagcttgactgagtggccccgaggcggccgggttacagcttgactgagtggccccgaggcggccgggttacagtttggttttactcatttcaggaagacacaagttacaggccaagacataaatcagaatgtggaaggtgcacactgatttggcctgaaaggcaggagatcttggagcagggtttacaggtcataggtaggttccacgattcttttttttttttttttttgagactgtgtctcactctgtcgcccaggctggagtgcagtggtgcgatctcagctcactgcaacctctgcctcctgggttcaagtgattctcgtgcttcagcctcccaagtagctgggattacaggcgcccaccaccatgcctggtgaatttttgtatttttagtagagacggggtttcaccatgttggccaggctggtcttgacctcctgacctcaagtgatccgcccacctcggcctcccaaagtgttaggattacaggcatcagccactgcaccggctggttctgcgattctttagttgacggttgattgaaagcgtgaagctttgtctacagaggtgaagtcagctggaaggaaggctggaattaagatgaggggtgtgggggccgaggcccttggtttgcagatgaagccttgtagattgcagccctcagagagaatagatggcaaatgtcccttttcagaccttaaaggtgtcaggccctcagttaatctctcctaggtctggaaagtactagaagaggaagtcctggctgcattcgtggagattctctatgggtgctagtttctctgagaaaggatggttctgtgggaccctttcaaaatatgtcaaagaaatatattttaaggcaaaatattctcatttccttcagagtctgctatccgtcacgtgatgctataccagagtcaggctggaatttggtgtcttattgccacatagagtgtgttccatccgtcttaggatcctgattttaatgtcaggactggccagctgtgcctcaactctgaaagggagggttgtggctgtaaccagcaaaggtctggctgctcaccgcttaaaaagaagccacgatgacaagagtggggcgtgatagaaagagagtgagctgccgggcgcggtggctcacacctgtaatcccagcactttgggaggccgaggcgggcagatcacgatgtcaggagatcgacaccatcctggctaacacggtgaaaccccgtctctactaaaaatacaaaaaattagccgggcgcggtggcgggcgcctgtagtcccagctactcaggaggctgaggcagaagaatggtgtgaacccgggaggcggagcttgcagtgagccgagatcacgccactacactccagccggggtgacagagcgagactccgtctcaaaaaaaaaaagaaaagaaagaaaaaagaaagagcgtgagcttcattctcatgctagcaagggggagattggccggaatcctttccaaaaatggccactcttcaatttgtagagggacgtgtagagggggtctggaatgcaggcgaggcaggggccaggaggtgccaggtgacctgctctgatggcttctcttgagttattgttccatctgttacagtaggcagctggtcagacatgagcagggcaggagagggccctcccaaccaggaatgtcaggcgaccatcagtgttggtcgggtggctgttaactgtctctctaaaataataattggtcacagccaacgccagggaaaggcagcctcccaacagacagaaaaatccttccccataagacctcaggcattgggtgagtgggctcaagcatgtgtattaaaaggcaaaattgtggagtgtaactggtctatggcctcctagggacatttgacaggtaagggaacaacgcctcaggtaagcaggcgcgcaactccagtaaacacatagcgcgtgctcctcccaagggctggcagccactgcacatgtggacagcccaccccaagggaagaatcaggggagaaggcaggccagaccccggaagcgtgccaacatataaaaccccaagtcgaaggtcaaaccacacacctgtccttcaagtcacctgcttggcccccttccaagcgtcctttccttcctttcattcctgctctaaagctttttaataaatgtcactcctgctctaaaacttgtctcggtctcttcttctgccttctgccccttggtcgaattctttcttctgaggaggtgagaattgcggctgccgcagacctgtacggatttgccaccgatcacaggttttggtgccgtgtcacttggataacttccaccacaaacacatctggtgaaggggctgcgccatcgcgggtcgcccccagattagaaatcaatcacagtcaatcttgcagtgagtctttagccaggagtaagctctggcctcaaagtaacccgcctgctggggaaggaattctggagatgcctggttcgtcccaggatctggcccccaaagcttctaggaaatagatgaccagacaggtgagcatggtgtgcactcagcaagcatccagataaacaaatgtgcacagggcccgggagctgcaggtgggagagggaaggcagtaggctcacagcttgctcccaggctggatttcaagatgaaaggaagcacatctgtagtttgctcaaagccatgtcttgagactggggagaaaggaggaaagaaaggccgtgttaaaacacagttcgaagctgagctgctcggtgacataacgaggcctgtgcgaccacccaggaggaggtttttcaggcttctctggggtggacatggccaagcgggggtcacttcagttggctggggacttcgggttttatttttggtttacactggcctgggatggaactgggcagttctaatgtgactgggtgtgtactggtggcttcactcacccagggcaggcaggcacctggaaccacgactcagaaagaggcaggaaggtggagtgagaagatggagctattaggggcgtggcaggggcaggtcaatcaccctgaggcttcggggagtttcctggtctccagaagggcagtgtgctcaccctcccctgtgcatggtgttgttaagagtgttatcaggagtgtctgctgagctgtgactttgccgtgccatgcaaatactcacaggcagcactactgtcaggaagatggaggctgggccgggaggcttgctttcaaggccacgagtgtcaaacccacaaaccgcagagcagaacagccttggccaagcagatgaggagggcctcatcctccatctcccgccaccatcctcttcccaactgaagtcagaggcggggaggtgggaagtcctgtcagaggcagggaggtgggacgccctgggccagacagatgatccaaagcccttggttttaggtaccatctcttcgatgtttcttggctgagtaaaccagcccaatctcttttttataaaatgagaccacaggttggcctgagaatggagaggagtgaggaatctagctgttctggggccccgggctgttcagaatccattgtaaaccattggaaagcaggtttgtgtatttgtttaactgcatcttgtggctggtcattgtctctgtctaagctctcacccagcccggctgccttccctgagtccccacctgacctgcacaactgctgaggacgaaagcctgtgtccccgacatgcacgggagagcagtgtcttcccaggccctagagtgcctggctgtgtgggcagccccagggcacagtcttctaaagaacctcattgagggtcgggggtcgggggagtgggctccagggtccactcccaaccttacagcttttacctccggaatccccaggcttctgtcaggagggtgcctgagtggcttacaacaagaactttgcctatccctttactgttcgcaaaacaccatctcaaaaatcagtcaacatggattccaagttttgccttaggccacactggatggagttgcccccggctggaagacaggacctttatccccagtgccacaggaggattcccctgtgtggcctccccaccggctgtgccctaagatcagtgctgtgtgcacagcccagcagaggagcccaggagactccagcaggcagggagctgctgccccaggagcacattccagcatctggaaacacctcccactgcagctgcaggggaagtgcctggaagagaaggaaaagaaagaggaggaggaggaagaggaggaggaggaggaagaggaggaggaggaggaggaagaggaggagggtcgtgcccacgctcatggcaagcgtcaccctggagctttctgtctcagtccaagcacatccacctgcccttcctcactgcattctcccaggggcccctggctgcacacaggcatggcctgcatttgcatagagggtctgggcccttggtggagggcctggcctgccccatcttgggtcctggcccagtgttgtggctgccaacctgccctcagagcttcacgggaaccaagggctcaggctctgagtggagtccgggtgggcctgggcagcctttgccggagaggctccttcctgacatggctctgctggaggagaaagtgtcagttcctctctcaggccctgtagacaggtgtccaggtagacaggaagttccagaggtgattttagctcagtctgttacttttctgctggcaggctggctttactgtggttgtccctgtggccgttggctgatgttgctgaaattccagggctctggagtgtccacatgtccacgggatgggaagcctgttgcagaccagccaccatgtccctgcggctcaggaccacgctcctgaagcccagagtcctgccctgggagcaggtctcagtcaggactgactcctgagaagaatgagaggggaagtgcctccaggccgggatgccagctatagcagcgccctccagcaacgtcctggaggaagcacctcattcgtgccaaactcactgattctaattcgtcatcgtgattcttcacaatgaagaaaaactccaagccagtgccttcctggggcatggcaggcctccctctggtctgagcaggcagctgtgcccagacctgggctcttccgaaggcatgtgactcccttgcacacagccgggttctgcttgatgcttcttcacggtggaggcagagaggttcccggggttaccccatcgtcgataatttcatcgttgatacttttttttttttcagatggagtcttgctctgttgcccaggctcgtggcgcgatctcggccactgcactgcgctgcaacctccgcctcctgggccacgagtgtcaaacccacaaaccgcagagcagaacagccttgttctgctgcctcagcagccaccatgattctcctgcctcagcctcccgagtagctgggatgacaggcacccaccatcatgcctggctaacttttttgtagttttgtagagatggggtttcgccatgttggccaggctggtcttgaacgcctgacctcagatgatccacctgcctcagcctcccaaagtgctggaattacaggcgtgagccactgtttccagcctttgttgatactttctaaaccatccctcctaagcccgggtggcttgctgcctgcagggctcctgacctcagtggctgactccccacacccgactccagcctgtcctccctgcctgcttacctggccgggtttttcccatttcgatccctgcagaggacaaattaaagtgaagattgtcacctgtgggtggcttgggagaatgagaggcagagagggtcaaagtgattgaattctgggttcaggaaaaagggatatgggtaatgtgtaaaagaagaaaaaaatacagatgatttggttaaaagcaattcgatcaaacacaaattactcaaaaggatttcttggcagaaatgaaagattatttgaacaataatgttcgacaatatccaatctctatctggtaattatctggatttatccaaccatagggtattatttctaaatacctaaattaggggaatacctaagaaaaatgttatcttgacttttttgttgttgttgagatggagtctccctctctcacccaggctggagtgcagtggcgtgatctcagctcattgcaacctttgtctcccggttttaagcaattctcctgcctcagcctcctgagtagcttggattacaggcgcccgccaccacacctggttaacttttgtatttttagtatagatagggcttcaccatattgcccaggctagtctcaaactcctgacctcaggtgatccgcccacctcggcctcccaaagtgctaggattacaggaccgcacccagccaattgacaaattatttttaatttttttttttttttttttttagacggagtctcgctctgtcacccaggctggagtacagtggtgccatctcggctcactgcaagctccgcctcccaggttcacaccattctcttgcctcagcctcctgagtagctggaactacaggcgcccgccaccacgcccggctaattttttgtatttttagtagagatggggtttcaccgtgttagccaggatggtctcgatctcctgaccccgtgatctgcccgcctcggcctcccaaagcactgggattacaggcgtgagccaccgcaccggcctgtttttaatttttatttatttatttatttatttagagatagggccttgctctgtcaccgaggctggagtgcagtggcacaaccatggctcactgcagcctcgacacccctgggctcagctgatcctcccaccttagcttcctgagtagctgggattacaggcacatgccgccacaaccagctaatttttgtattttttgtagagagagggtttcacaatgttgcccaagctggtctcaaacgcctacactcaagcgatcctcccgtcttggcttcccaaagtgctgggattataggcgtgagccaccatggcgggctgacaaattagcatataaaatatgacttaattgtggatttttatagttatggaccctaatgggcataatgaaagttatgtatggaagcacacctcagagcaaaaatacttagagtgaaccatggtaataaggcttcagagtcctttatttatgtatttatttatttgagacggcgtctcactctgttgtccaggctggagtacagtggcacaatcacagctcactgcagcttcgacttctcaggttcaatggatcctcccgcttcagcctcctgagtagctgggactacaagtgtgcgccaccatacccggctaattttttaaaaatgttttacagagatggggtctcaccatgttgcccaggctgagattatttttattaaaaaaaaaaagattgcaatatgaactctctcccttcctaaacagataatgcagacttttttcctttcaaatgaagaggttttattggaagttgcatagagaacacagtcagtcacgagagcagaaggagcaggttccaggattctggggagataagggtccaagctgagaactcccctgagaagtctgtatgcagacagccccgggtgatcctggctgtccaagggctgagggcgggttgggaagggccctcatcaccccaggggccagctccccacatagcagctgagtagcacccagagaacccggatcttcactcaaggtggctggcagcagagccacagcccaggccaccaaagccaccagagcccctgtgtggcaaggatcatgatgcgagggtggtgagttggttgctgttctcagcaggatcctgggtgtaaatggccatgcctgtccagcacggcttatggggctgagcatgtgagaacttgtgtggcctgtgcctgtgcaaacgcgtgtgccctgggtatcacacccagagccctgctgtgtgaagaagcctcagtcatcacgtgtgagctcacagtgggctggtcatggggccccttccacatggtgcactgctgctgcaggaattgctgtgtctgcaaattctggacataccagaccctaaatagaatgctgggagcaggcaggttacagaagcctctgagtgcggcagctctatgggaactggggtgcttcacttacaagtatttgaggtattacaatgtatccaattttttttttttttttttttgagacggagtcttgctctgtcacccaggctggagggcagtggtgcaatctcggctcactgcgacctctgcctcccgggttcaagcaattctcctgcctcagcctcctgagtacctgggattacaggcgcctgccaccgtgcccaactaatttttttctttctttctttcttttttagtcagagtttcgctcttgttcccaggctggagtgcaatggcgccatcttggcccactgcaacctctgcctcctgggttcaagcaattctcctgcctcagcctcccgagtagctggaattacaggcatgcaccaccacacctggctaattttgtatttttagtagagatggggtttctccatgttggtcaggttggtcttgaactcctgacctcaggtgatctgcccacctcagcctcccaaagtactgggattacaggtgtgagccaccgtgcctggccaatttttgtatttttagtggagacggggttttaccatctcggccaggctggtcttgaacccctgatctcgtgatccacccacctaggcctcctaaagtgctgggattacaggcatgagccaccgcacccggcctgtttattttgtttgtttgtttaactccccctgcacctccgccaaaaaaaaaaaaataaaagaaaaagaaaaactaacctgtaactctgaagtgtctggtagccaggtgcggtggctcgcacctgtaatcccagcactttgggaggtcgaggtgggcagatcatttgaggtcaggagtttgaaaccagcctgaccaacatggtgaaaccctgtctctactaaaaatacaattacctgggcatggtggcgcacacctgtaatcccagctacttgggaggctgaggcagaattgcttgagttcgggaggcagatgttgcaatgagcagagattgcactccagcctaggtgacagagcgatactctggctcaaaaaaaataaaataataaagtctcttgcctttggagtcgggcatgaaatcttaatccgtgagttttctacctgggccatggtgggccactgaccaccttcggcctggatgaaggctggcccccagagggttgccaagctttgccagtgctccctggcctgcgtggggcctggctgagggcgagggcaacaggaatgcattgtgtctggggctgagcaggacttgcggtgcctgggccctttgagcctggtgactcctgagtgtgactcctgagtctgaccccatcacccgtgtgggctgacaccagcaccttccacgctgtgcttctgtgtttgccgccggtctccaggagtggccgcttctccatcaaataatactccagtcttcacgcccatggcttcccccagaccccagcccagcccgagaacaaacgctccattttccctcccttacagctgcggtggttgccaccacatggaaggcccagaggaagggaggtctggagtggcctggagctgtggcctccccaggctacggccagacccaccaggaggaagccccttgcaggctctaaggttaacgccgccaaaccaagtcctgatcctgagaggctggctcaggatgaggatgggcggtggtgtcatgcacaggcacctgaggtccctggctgctgtggcacggagaggcccccacggaaggactccgcaggtgctggagctcgctccctgcatggacagctgcagcctgggcagggataggggagcaaagctgcaggcccggctcatcatggaaattcagaccggtgagccatggaaggacatcgccaagtccatgtagggtgagctggggacagcatggggagtgggaggggggacagtggggagaggggagagcggggtgagctgggtacagcatggggagggggacagtggggaggggggagagcggggggagcctggggacagcatggggagtggtgggggtgggggaaggtggagggagggcagtgcatggaggacagtggaagagggaggcagtggtgacagtggagagggaagacagtggggaggtagaagggaggagggtaggacagtccagcccccattggcaggggcagctggggagagcaggccccgcctttgtgtgccccagggcctgggcctgcctggttaagagtctgcacactcctagagctggagcttctcaatgtcgctcttggaaggtgaccccacactccgctggggataatgcagggggcccaggggtcctccctgggaaaagtgtgctgtgccccgccatagggttcgtggcagaagcccctcccctgagctcaggcctcacctccggccactgaagacaaggagatgcagagaggaggcctctggagtcttgccccttacccctgcacccctgcagcacaggcagggtgtggtggccgtcttggaggcacccgggcctggacagctattccaaagccatagctgccctccccagggtgggtcgcttggtcttaggagcgtccaagctgcagagcccagtagacagaacctggatccagcgcctcactttacaggaggggaaactgaggcacaagcatgtgctacctggctcgggggccagcaggcagccttttcccttctgtcacctgccctagggatggaccgccccatctgccagccttgactggagcctccctggtggatgtttaccgcacacctactacgtgcagggtggtgcagctggcgagagtcccctctcctgttccacagaccggcaaggttcccctgagccctggggcaggcaggacctttggctggaggtgggtgtgcagggcagggtctctgaggggagacctcagactgtggacttgcgggtggacgcttctctctgtcggggcctcccgtgtccagaagatgttgaacagcatctgaggcttccacccgctgaagccgaggaacagcccccagctgtgacaacccaaaatgcctccagacctggccccatgtcctccagggggacggaacagcctggtgtagggcagggtcccctgagcaggagtggcacctgttcctgctcataccacagacagctgagctggctgtgcccaagactccctgcacccaccaaagccactggatacaggcacgatttgcatcttactctcttaagtcaggtttctggagatggctgtcccaacactggaatccagcctgtctacagcaagggagaaagaggaagctgatgttgggctgagaggggcaggcgttacagggtaggtctcacaaatgccgacgtgacaggcagggcttctgagggggcttcagggaccagcagggaggcgagactcaggcactgacccgcagagagcatggccttggacgcacagtggtgacagcagcctccaagtgtcccccgtgccctcaggcatgagggacagaagcttctggggcccctgcctctttcctgcccatcccctggtgaaggaaaatcgcctctgataggaaaagctggggccagactccctctccctgcattagtgtcgccgtcctgcctgtgaggtccccgggcccagggcacctcccgggacacccgagtggtgatgcacgaccctcagtcctggggcttaggacctctgggtgcccccgcaggtccgtcctggagtcacttcacagtcactgcaaatgggcaccacagcccactttccaacgccccaactttccacacccaagcagctccttgtccctgccaatcaatgcccggtgatgacaactgttcttttataaacaccacacatcttctaatgctttcatgttaaaagcgggagtggatcccacattcacctaaaggctcaggtagggactttttttgcagaaaaccaatttcttgtaacaagtactggaacctcattgtagccttgagtcctcactcctccttttgttctaagtctgggtctgagaagtgcaggcctcacacagctgtcagttccaagtgaccagggctgtaacaggtcctggctgaccctgggaatgtcaggggattctgggaagtaagaaggaggggcatttgcccatagccccggggcagacaatgtgtcccgagggccaggccaggctgtctactccatctccctggggcgagtgcacctcgggtcacctggcagcatcctttccagcccttctggagacagtcagcagctgattcattccgggaaccagcatggcaggtgccggggctggtcagggcccagggctgtacccctcagcactggaccaccccgtctcctgcccccttgggactgttgggctccgaggagcctggcgctggggtcggaggtcttcatcaggaccctggggaccctcagggttgagtggggtggggctgctgagggtggtgggggccgggggagccacctctcactttggggatcattgctgaggtgagaagggggactgtggccaccaggtgataccctctccatgcacctaactgctgctcaggactctggggaccgtgttgccaggcctgcgcctgctggacatgggcgtctccagccctgctgggctgtgtctttctcgctgcagagccaagagccccggcagcccctgtagccaaacacggccctggcacagcctttcttctggcaaactccacccgtgcgtcttccaaaggtggctcaacttttcaccggaacagccgagggacattgttcctcccagggaatgtggcagaggacactgaagcccagtggggacttccgggggctcctcggtgtggacggctaactacacttgtgggcacacacatgagtgggtcctgtggcttccgggcgggaggcaggttgggagcgttcagggcagaagagctcctgtgaccgtgtcccctgcaaacagcctcgcgtgaccccagcagcacagaggccgtcctggaagagcggacgcccagtcttctttttaaaccaaacacccttcggtctcaggatcccgcatcccacgggaagacccacagtgggtctggggtactgggaagagcctggtgctgaatcccgcacgctccgggtagagacagcccatcaccagtcccttcctgtgggtgactggcagtgacagcggggagcccactcacttggggacatttgcctttggtgtggatgacgcttttgaaagggcctcattccaggatcacagccaacgccagcaggttctccctgggatccagcagtggtccttctgggggctgccccaagtgctcccctgcagtctgggagtccatgctcaagctgccacctggcctctcacggtggcgtctcacggaagccctgtccacgctctgggcggtgagctccggtcaaacgtggccttggaagggagatgaaggagagagaggaacatgaagcacccctttcccttctgcaggcagacgtcggttttctcaggactcagcttggtggaaacacagggtttaaagcttcggaaacagcggcctgttcagggaacttcgactggctccgacgggaacaggccggccgtgtttttagcaagctgtgttcctgcatcatctggatgggccgacctggccttggaagtgcgtttctgcggtcggccatcagctcgcctgggtccacaggtgacaccacagcatggtggctgcgcacaccctgagcccactgtccccggggaaccccttctcctgggcggcaaacagggctcggaggggatcctggcccatggcggggagcccggctggcctgcctgcgaagcccagcgccccttgcagccagaggcacctgccaggtgggtgaccgtgtgtggacatttttcccaaattggacaggaatccacatctatgttgctcctggaactgaggggcaaacgagagctgcaggagtggctgccacagagagaagctggcggtgcccggacccactccggacaccccacaggggctgggcgccggtgcctggacccgccctggacaccccacgggggctgggcgccggtgcctggacccactccggacaccccatgggggctgggcgccggtgcctggacccgccctggacaccctggtcggggctgggcactggggagcgcgggggtctagcactcgtctctctgcttctgtgcatgttgggaaaatcccatcgcagtgtgacaaagtgcacaccaggatgccatcccatgccaaggggaggctgcaggaaatgccatgcgcaccatcgagggcttcgctgcgtctccaggaacaacagttgttcaaggcaagggacttttgccttttgaaagttttttgaaactctgaaagacagctggcagccaagcctcccctgggccccccagaacctgctgcttcccacggcaaactcaccagtgagctctgtctccggactcacagcccaggcacctggaggacaaaccaaaatggtcagggcagcagcgatggggggtgtccctaaagcccctggtgttcctgagctctcagcagccccctaaacaccctacttggaagtctccccaaggctcccagctccaggcggggaaaacactcacagatgaggggctccccaggccacgtggcttttgagaaagatcctcttaaaggggtacgtgcctgggaagcacttaaaatgctgtgacctggatctggggcccttctgcggcccagccagcagtggcatcatggccgtggaagatgtttctgggatgactgagattggccacaaatgggaaagccaggggcagcccacaggagccgcccctactccgtggccactgcgcctgcactccattgactgccacccttggggggttctgggaagagccccccccgtcatcaggaccatcactgcagccaacgttcagggcttcctgcgccactgcgtcctgctgctgtgtcttacatggctgaaacacagacctccgggctctgtcgcggagctggccagagtcacagacccacagggcaggagtgctcaaggcagcctcagcggcttccctggaaatgaccaccaccccggcctctacatgcagaagccaccctgcccacccgacctgcagggcagacctcgcagcgcccttctggcttggcagtgtcaggaatgtcagagatgctgggtttcaaaaccactttgtgggatagttcgggttgctaagcctcatgaatattagtgctaccacaacaaagttcctttgtttttttgggggggacagagtcttgctctgtcgcccaggctggagtgtagtggcgtgatctcggctcactgcaagccccgcctcccgggttcacgccattctcctgcctcagcctcatgagtagctgggactacaggcgcctgccacacgcccggctaattttttgtatttttagtagagacggggtttcaccgtgttagccaggatggtctcgatctcctgatctcgtgatccactcgcctcggcctcccaaagtgctgggattacaggcgtgagccaccgtgcccagcctaccacaataaagtttcaagctaaatcagtatcagtgagggaagttaaagcaggcaaacattcacaccaacaggacaaacactaacatccacaatatggggccgtctctacctgcatagctgtgttggaggcatcggtccctgcacacccagcctatggccaccgccacgaccacaagcaggcacaggacagccaggatgctccacgtggccgcgtttttctcgccggtactgactggattctctgtgatcttgtctctctctccgatgtcatttcctacaagaaagaggaaaataacccgacttaaaggatcttagaggaaaagggtcttttttttcatccttgagtagaaagtgttgcaaggaagtatttattccagagaacttccctgacatgattttgaggttttaaaaacaccaaactgatgagatgagggttttctcttacagaggggcttcatttcctgcagggatcttgttcctcctcgtcctacctgggaggggcgataaccccaaccacagccaggggaccatagggctgggtatggtgggaagcacaggttcttactggattttttttttctttttttttgaggcagagtcttgctctgttgcccacgctggagtgcagtggcgtgatcttggctcactgcaagctctgcctcctgggttcacgccattctcctgcctcagcctcccgagtagctgggactacaggtgcccaccaccatgcctagctaattttttgtatttttttagtagagacggagtttcaccatgttatccaggatggtctcgatctcctgaccttgtgatccacccacctcggcctcccaaaatgctgggattacaggcatgagtcaccgcgtccggcccttactggatttttaaaaatcaaagtgaggtcaggcacggtggctcacgcctgtaatcccagcactttgagaggccaaggcgggtggatcacctggggttgggaatttgagacacacctggccaacatgcagaaaccttgtctctactaaaaatacaaaattagccaggtgtggtggtgcatgcctgtaatcccagctactcgggaggctgaggcagaattgcttgaacccgggaggcagaggttgcggtgagccgagatcgtgccattgtactccagcctgggcaacaagagtgaaattccgtctcaaaaaaaaaaaaaaaaaaaaaaggtgaaagccacataacataaaattaaccatttcattttatttattgagcttttgagacagggtcttgctgtgttgcccaggctgaagtgcagcggtgtgatcataggtcaccgcagcctcgacctcctgggctcaatcagttctcccacctcggcctcccaagtagccgggactgcaggcgtgcaccaccaggcctggctaattttttttttggtagagatgagatctcactatattgctctggttggtcttagggctcaagtgatcctcttgcctcagcctcctaagtagctgcaactataggtgtgcaccaccttgcccagccaaaatgagccactttatgctttatttatttatttacttttttgagacacagtcttcctctgtcgcccactctggagtgtagtggtgcggtctcggctcactgcagcctccgcctcccaggttccagcaattctcctgcctcagcctcccgggtagctgggattacaggcacatgctaccacacctggctaatttttgtatgtttagtagagaaggggtttcgccatgttgtctaggctggtctcaaattcctgacctcagatgatccacccacctcagcctcccgaagtgctaggatcaggtgtgagccacccctcccggcccaaaatgaaccattttaaagtgaacaattcagggtgccagtgccatcataaccaccacctaattccaggacctgtaacccccaaaagggaaccttgtgtccatgagcagtcactccccactcttccctgccgtctgctgtctttctgggcagttcatcggggagaatggtcgtgtccatttcagatggactgtgagcccgtgtcagcagcaagaaggagcagatccaaatgagggggtctcagaacagctggggcctctaatttttctcttaaattttgttctcatttagtgcttcatggcactcccttcaaatttcacttttaaaactctagcttggacgtggtggctcacacctgtaatctcagcactttgggaggcttaggcaggagcatcgcttgtgtccaggagcttgaatctagcctgggcaacacagtgaggccccatcgctacaaataatcaaaattagccaggcgaggtgcatgtgcctgtagtcccagatactcaggaggctgaggcaggagaattgctgtcctcctgcaccagaagcctccagttgctttgtgtctcagtggctcaccctattctggacactttgcataaacagagtcccacaggcttgtcctcaggtgtctggctctgtcactcgcataatggccttgaggttctccacgccgcagcgtgcgtcaggacagcggcctccttcctttttcaggctaattctcccctgcacgcatggatcacgtttggtgcatccgtccacccacgaggaacactcgggtggttcctaccttctggctgccatgaacattcacggacaggcatttgtttgagtccctgttctgaatcctctggcctatatcgctaggagagaactgctgggtcctgcagtgcttccacgctgagcttttcgaggaactgccacaacgttccccatggcagctgcgcccttctgcttttccgccacgatgcacaaagctaacaatgcctctggtctctgtgtgcagtgcccttcagagagccgtcctcaccggcaaacaagcagcggcatccccctgggagcttgttctgaatgcccggcgcgtctccaaacacacttggagaaaccacctggacggtgctcaaccttgaacctctgaagcttttagacactgtcccgatgccaggtgccagcccagagcttcaggtgcaatgggtctgggcatgggggctttcataggctgcccagatgaccccactgtgtggccggggttgagacgacagccctgggagaagcttctgctgccacctgggctgctctgcggggagtatgctggctggaaggcagttatcagaggctgctttgggagcagcccctcatcccgctgcatgcagctcagacactctgaatgttgagtcagaagggctgagccctgatttcaagaaggagaaggtccggctctgccggggatcctggcggccagggtggacttcgagggtatgacctgtgcaggcttctggggttgagctcagaaaggccggcaggaggtgcaatgcttgtggtcactgtctggaattcttaatgctcccgaaacaaggagccctgcattcttgctttgcccagggccacacggtgagtcctgctggcagcccctttcctgcagccagcagggccccaggacccctcctcgatcatctcctgcctccatcttctgcctctcatcctgacacaggagatggggacacaaatggggagggcctgtgtcctctacaaaggagtccccgtagaggaaccccttccacagggcaccccttccacagggaggggctgggccagcagccgtgcgcagtgggattcccgtgtctgggggcttcagtcttctcaggggacacacgcccaagaggcagggagcttgggtgggggctgcacagctgtgggcttctgttctgggctgctgctgcctagtgctgcggcttctgaagtgttacccagcctcagagttcagccctcatctgtaaagtaggtttaagaaaaccgactccaggtgaagaaaatggagcaatatgcactgggcacggcacccattcctgttcccagagaccgcggtggttctcactgtgcggcatgtgcctctcacctcccctcccttccaaccacctttcgggtgctgagccgcgtcgaagggactttttgtctcctacctcagaggctctcccaagccagccctggccccactgtcgggcacagctcagcacgcaggcgccgggaccttacctgtctggctgccgacagtcaggttctgctgcagaagcacgttctctatgcagcagccaatgttcacgctgggggtccgtgcgatcctcagcacgctgaccacgtcatacaagccccgcatgttcaagaagacggtgtcattctgcagagcctggtccagcaggctgttgtccgtcttattgatccagtacacgttgggcctggggtagccgtttatggatgtacacgtgaaggtgagctcatcctgggaggggctgtggggggcgctgacgacgggcacgctgaagtttgctgcaggggagggaaacagattgtgagagatgccagaccctgctggtcaagaaacagagggtacacggtgccaaggctgggtcagaggggaggcggcccattgtgccccgacatgggtgacaggccaggaccagggctgtggtccgagcagcaggctccgccctgtcctgcccaagagtcatcccccaagccagtcccagtagccagggaccgctgagcctgtcgggcagtgactggcacccacagaccccccactccacagccgtcggctgtgccgggaccccctcatttggatctggtcattctcactgctgacacaggggctcacagtccatctgaaatggacacagctgttctccccaatgaactgcccagagctccttggttgcctcttatttttctcttaaattttgttctcatttagtgctttatagagttcccttcaaatttcacttttaaaactctagtttggatgtggtggctcacgcctgtaatcacagcactttgggagggtgaggcaggaggatcgcttgtgtccaggagtttgagaccagcctgggcaacatagtgagaccccatttctacaaataatcaaaattagccaggcgaggtggcatgtgcctgtagtcccagatactcaggaggctgaagcaggagaattgcttgagctcaggaggtcaaggctgcagcgtgatcacgctactgcactccagcctgggcaacagtgagaccctgtctcaaaaaacaaactaattggccaggcgcggtggctcacacctgtaatcccagcactttgggaggctgaggcgggcggatcacgaggccaggaatttgagaccagcctggccaacatggtgaaaccctgtctctactaaaaatacaaaaattagctgggtgtggtggcacgcgcctgtagtcccagctactcgggaggctgtggagaattgcttgaacccaggaggcgggggttgcggtgagccaagattgtgccactgcactgcagcctgggtgacagagcgagactccgtctcaaaaaacaaaaacaaaaacaaaagctaactaactcaagaggcaaagacagcaagggtaggagctcttccgggaaaccaagcagccgcaggtcatgcactaaggatttttcagctgtttagtttccctcgaagttagacagaagcctgataacacagatgagaattttcttcactggaagaaacagtgaatgagccagggagggggtttcatgaacacttgtccacgatgtgaggctgggatggacctagctctccccgcctcgatggtcctacctgccacatgcagtgtaacctcaacgctcaaaacctcctggaatcccagggattggctcaacaccaggcagtgaaacttctgctcgtcctggggggtgacgttgaacaagcgcagggagaagtcgccccgcagcatgccggccggtgacatcagggctcggttccggtagcggctgtccacgttttccaaggagctgttctgtgggatgtggtaggtcaccacggttttcgactcactggtttgccaatatacgtaaacatcatttaaatcaaaacggcttccttcagggcaagcgcagctgagctccacgtcgctgcctaccatcgctctgacttccttctcctgagtatctgcaatggcccaaaaggtgcaaaatctgttttcggaggctgatgcccaggccatgaagctactctatggggcagactttgggtttcaagcctcaaacaccaacggtggctcagaatttattaacaaggcacatgtaggaatgcagtcaaacttgaaaaacgcagacatttcatggtgaggtccatgtcagtctttggcttcgatgacacactcctgttatgtaaggggctgccatggggaggagcggctggatggggcctggccgctcagtgttatttttgttactcagcactacttttactacttctcgggagtctataattaatgcacaataaaaagttctttaagggaaaggcatttaagggaaaagaatttctcagcaattacattatattgctgctcacttgcagtaggaaagctgtcacaaatgtggcagacacagggtagctttactgtttgtgcagctacgtaaatgcctgtgggaaaatctttttttttgagatggagtcttgctccgtcacccaggctggggtgcaatggcgtgatctcagctcactgcaacccccgactctggggttcacgccattctcctgcctcaccctcccaagtagctgggattacaggtgcccgccaccatgcccagctaattttttgtatttttagtagagatcgggcttcactatgttggccagcctggtctcgaactcctgacctcaggtgatccacccgccttggcctcccaaagtcctgggattacaggagtgagccactgcacctggcacctgcaggaaaatctgtgtgtgtcccctgcccccaaagccctctgggctggaaggcttggcaaggtttcaggtttgtgctgcggtgcttcgtccttattcctggctcttccagaggctggtggctcttagggctcagcagggctgctgcctgggacagggagaccaggggacccaggaagccctggctcagaggaactgcattctgcccgcaacaaagacggagtcaaacaagaactccggagtttgcagaagtgtttccctttaaggaaacgcttctatcctgtgcagcaacctaggtttagggtccaactgtctccaaaggaccacttgagaagcaagaaggagcctggtgaggctgctcccagtgccctgcggccagcagtccacacagccggagagcccatctctgagctgggcgccccatggcaaagcaccccctgaacttaccagctcgaaggctgctgaagagcaggaagagcagtccaggactggaaaaaacaaccagaaaggcaggtgaggcggggccaccagggagttacctgtatcttccaaacaggaacaggctggttcccatgagcaggaggtagttaagcccatcacagaaatgtgaaggcagagccaggagcctgcctgcctctgttctccatgggaattcggggtccggggccaggaccaccaccctcctgcccagcacagcaagtccgaggggctggcagcctctcaccactctctagctctcgcggtaacaaatccccagaaacacagtgatgctggcgtgaggatgaaggggagcgagggacgccagtgaggctggtctagccttcctggggacagatgccaagaagttgtaggaaatcagaaaaaaaaaaaaaaaaaaaagctttcagggcacatatagtaggagtgtcacttaaaatgctggggagacggagaacatcaggcgtgcccgtgacagggtcaggtgagtgacgggacagccctgtgcggaacgcggatcattttgaaaccaaacctgagctcctcctgtttcagatcctgctgcagctggtgcccctgcctcgggcagcaaattcccctcgtgactccaatgcccctgccatcttgggtctgggagcctttgcaccctgcacgccacaggctcgccacctcctcccgccagcccccaggatgccttccccacgtgggggcccttagtggccgggaccactttggtagcagtgcttaccccagccccccaaaccatcagtttctggggccagctccccatgaagcaagagccccaggagcagggacatctccttctctgatgtccctgcacctccaaggtctgggagacgctcatccctcttctctgtggcctctgcctgggaaagcttgggggctttgtaagtcaaaggttggtcttgtgggaacctcccagtgggctgtccctgagccctggagccacagaaacccctgccccacccacgatggctgtcatctgagtctgcatggaggtgtgtctgtgccaagtgagcacacatgcaccaaggcggcccctggccaccaggggctcttgaagtctgcaggcggcccttcctctctctcccactccccctgttggggccaccattctggctggcaagatggctgtgatggcctccagcaggccccctgcctccacccttagccccttcaagcatttccccagagccaccatctaaacgacagctgtgagaactcctctgtgcccccatttgtctcccacagtgcccatattcatcaccagcccacaaggcccctcctgtctatggaggcctcctcaggacatctgggggcttcctgggccagggtggggggtgcctgctccaggctgtttctggcttgtcccctccctgggtgctgcctaagcagcggcctctgtgtcctttccttggaccctcagcacccctgcatctaacctacccccaccccgagcttgcctcaagacccagcatggacagggccgcctacctgaaggtgtgggtggcggagggctaagacatttgggagggctatgacattccgggacctttaaattctttctctctagggcaggatcataactgcatacacttctaatggggaggggacctggggagtgtgactccggtgtggcccagctctgagctgtgcgggaggcatccctggggtcaggggcctcacaggttcacccaggggagcacaggctgcggaccctacaacgtgggttgcgaagagtatattttggatattttcgcaaaaatccaggaggaagctgtcactcctggttcaggcagccccgccttccccagtgtggatcggctgccgggctgcggggaatcccacgtgtgtgggggagggcgtgtccgcagaccgtgggcaccagctggccttggagagcgctcggccggtcacctccctccttctcccttcttctaggaaatcagcagtgccagggagtggaaggggcagcgcccgtgccccggcgtgcagggtgcgcccgccttccctccctccttccagcgttcgcggtcctccttccctggcagggaccccgcccccgagcccgcccccgcacggctgtgcgtcctgccatgggtcccggtgccaggccccgccgcccactgccgtccacgccccgccggccgccccggcgcctccgccgcccgctcctcggacccgcactgccagcccggcacctccaggcgagccccgcaggccccgcgtccgagccgagctggggacgcgcgggccgagccaccccgcccctgaccgcggcgcctccgctccttccccggctcacctgcccagccgcatggtgcgggcggagacctcgggccgcggagacctcggggcgcggagacctcggggcgcggagaacttgggccgcgggagacctcggagaggagcaacctcggggcgcgggagatcggctctaactgcgctcccgccgcgcccgaggctctgagcgcccagcgcgcggtgtgctggaggcagccgtgtccccgccccgtccccgccccgcccccggcctggctcctctggcgaccgagaccgccccgggacaggaggcggggcgctgcgcggcggctccggaaagttcggctctgcccaggcgtgtgcccgtcggccggaggcgggacagaggcaggtcggcctgtccgcctggacgcggacctgggcgccgtaggtgccctgggaagcgcaggggtggggggtacccggcaggaaggtggccaggggtgctgcgggtgccggcgcagcgagggagggcaccgtgggaggcaagggccgttccccgcgccgcgcacaatgcgccggtcctgcggccctccccgagcaggagtccggggacccaggccccaaggctgggagagcgccaggcccctggccggctgcgctccgatgatctccaggacttaaggcgagtgagctcagcgactgctgaggaatgaatgactgaatgaacgcatgcatgaatggaaggagggagggaaagtgggcgggctctaccctctgggccagccccagcccgcccccacctagccttgctcccctagccttctaggggtgtgaagggcgctggcgcagcctctttgcttaacactggctctgaggatcccccgccgagaaaccgaggcaggcttgcggctctgggctcgtcagccttggcagtggcgtctggcctggagtctggggcagctggtttgggaaaggctgcaccacgcaaccgagggtgggacccagagtccctgctccttccccaccgcacccagcccaccccgccctccctccctgatccctgcaagccaggtgaggcccaggggggacgtgactccctttctgcagaggcacctccggaagggcctgggtgaggctgctagacagggcagcggggcaccctcctcccggagcccccgcctctgggctgaggctcggatccccaccgcctcctgcgcatggaggaggcgagaagcgcagggagacgggggccccagacggcaccccgcaggctgccattccttcaaccaagatgtagagaacgccgtggacaaaagctttaaaaaaattctgaaacctctgcccgtgggaagtcaacatttttgcggagcagagagcccaggcacaaaataagaaggcggaagagacgggctggggggataggggggacggcggcggggaagggcagggagggcggcggcgaaggcgcaggaagccctgaagccgggcggcttccccctcccaggccacgctgagagacgggggttggggggatttaaaatcgcgcgcctggcaggggcggggcgggggccacctgccctccggcgggaagagctgggcagggcccgcggagtgcagggcggaggcactggcggtccgcacccgggtgaggtgaggcgcgtaaccgcatctgagccggactctttaggacgagtcccgtccctggagtcagaaaacccggtccagcgccagcgtggacgtgcgcttcccgggacacgcccagggacgccggctaggaccggcgaggctggaggggtggcgatgttgggggctgaggttcctcgccccggggcgggcggctgctggtaagggaccgcatggccccgcaggtgaggagggcgcaggtgaggagggcgcaggtgagccgggcgggctgcgggcagcgccacctcctcccggaggccctccctgattgaccggccgggaaccgcgcgcctctgggcctgcggctgaggtccggggctgcgccgcgccgatgagctgacgccgggccgagcgctccacccccagggccgggcgcacctgaatcccctccacccgcgggactgcggagagggggacggcccccggataccgcgtgggggctttgggaggatggggaatgggtcctgggggagcagagcctcccaaattaaggcctcccaagagcgcggccggtcatccgcggcggcgaagggaaggtgccctgtcggtgcgtccggaccccgcagccccccagtgccgcccgggggcggtgggagaggggccgacaccgcagggcccgccgtgctgtggccgagggggcaggtccaggctctgcttcccgggcagacgccggagaccccagcaagccaagtgctgcgggcagccccccccccgcccccccgagagaggggacgccgcgtggaggccacagccaggcaggggcaggaaggcagctgggccagaaggggacactgaggcaggccgaggcggccgcgggggagggtgccaggaccagcccaggaacctcggagaccacggtaagcggtggctggttcagatcccaactccggagctgtgtgaccccagaaagttccttagccccttggtgcctgcatcccctgacgtgtgacatatacatgaatggggctgttgtaagtgaacgcacacagcacaccggcacatgtgtcacaacacttagatgggtttagatgaagaaacagggaaacctttgggaagtttcctgtagtcaaaggaaggttttcgttttccccctcaaccgtgactgtttcttgggccggcaggataggcttttgttctaggggtgtggagagagggccccttggcagcgtccagggccaactgggaaccaagcaggaatcgtatttgtgcagcctggagttcgaggctctgggtgcgagtcgtagtgcttaagcaggaagcagctgcctgatgcccctagccccaggccgccctgctctgccgtttcgagggcgtgggggtcttctgatctccaccttgatgcacctccaggcccgggtccttttggggtctggcacagcaacctgcgtttgacagcatgggcgtccgctgatgctgagagctcaacttctggtccaaggaagatcttttctcttcggggaacagtcatacattgtttaacgaaaaggatacattccttctgagaaatgcgtccttaggtgattttgtccttgtgtgaacacagagtgcacacactggccctggtggcacagcctgctacacgccgaggctgtgtgtcacagcctgctgctccagggccacgagcctacgcggcaggtgactgtgctgaatagcgtaggcagctgtgactcactggtatttgtgtatctaaagccatctaaacatagaacaggtgcagtaaaaataccgcgctgtgatatgggagcactgtggcattgcttgttgaccgaaggttatgtggtgcatgactgtatgttcgtttcctgtgggcgctggaactaacgacctcacgcttgctggctcaaaacaacagcagtctattctctctcagccctggagagcggaagcctgcctggtggaggcgctaggggagtatcctacctgcctctcccagctctgggtggcccaggcatccctgtgcttagctccagcagccgcctcagtggccatgtggcttctctgtgtggtcaagcctcactttgcccctctcttatgaggacctttgggatgacacgtagaacccacctggatgatccagggaggccttccacctcaatttaatcccgtcagcaaagtccttcctttgccacatgaggtaacattcacaggatccgggaatggggacatgggcatcctttggagggtggttcagctgagcatgggatcatgatacaggtcctgtgtataaaattcaaatacttggcaggtcgggcacagtggctcacacctgtaattccaacacttagggaggccaaggtgggaggatcacttgagcccaggagtttgagaccagcctgggcaacagagcaagaccccatctctacaaataatttttaaaaattagcagcgcatggtagcatgcacctgtagtcccagctactccagaggctgaggctggaggatctcttgagcccaggagacggaggctgcagtgagctatggttgtgccactgcactccagcctgggggactagctagaccctgtctcaaaaaataaaaatttaaaataaaatacatagagaatctcaaggtggtgtggacagttctgagtgttggggagagaacaaaagaaggaaagtgcattttgggtggcagaaagcccctaacagagccttgggcccctgctttgaagcagccctcacagaaactgaccacgagttatgttgggcccatgacactggttccctgggtggacacagcctgagcccagcccgccctgtctggagctctcaccaccctgcctggcccgtgcccatgggctcacaatggcttcaaccccatttatgtgtcagctcaagcaggcctccccagagggctcatttgcacttggatgccctcacctgtgctccctctgtggcttcaggaaccccggggtcattacagagcttgctaaattcatccctggacgtgagatgtgtgtcgtaagcatccaggactgtcccaagatgggagaggcgttcagtcatgttcactcaagtgaaggcttctattctacttccagatacacctttttaaccttcaaagggtccaattttaacctttcttccacaaagcattttacgtaccactaatagtcccagtgcagaccccaaagttcccctgtaagattcatttcctgtgattcgagcacagcctgaggcagagctttctgctgggtttatcctcactgagactcagactgcagagggccaggaggagccctgctttttgcaagcaataccacctggggtaggacccacaagtgacatcctttgtgcgtggatctggccttggcctccgcaccgtctgttcagcaagtccctcctttgcctgccaaggctgaggtcctgtacttttgtgtgtggatctggccttggcctccgcaccgtctgttcagcaggtccctcctttgtctgccaaggctgaggtcctgtacttttgcaaaggtccaggctgtttggtgcagctacaatcagggtgcgtggtttctctatgaacgcaaacagcggtctcaaggggaaggccccggcagaaagtgcatcatgcgggacacggtgcaggcgctccgaagacgcctcctgctcacttctggcctccaccccctgccctgcagggtgacagatggctgtgcctacacataaaacaccagacgtgaccaataactatcttataataaatatactcgaacttctcaactagaacacagaaatgctttcaggaagtacatcgcgcaccaccacgtgtggtcctgtgtgcagcggcgtgggcctcgccccgtcccatgagccagcgtgatgggggagagaccctgagtctccagaacccaacggaacgtgggtctgcagtgacgacggagacgcaaaaaaacaagaatccgaagaggaaagagacaacgtgaggaaagttgcctttgttctaggaaaagtctttttcttcacagtatagtgactcatttataaagaggaagtgagttctgttgaaaaatacttgaaatattctcttagggggagaaagcagttcttcaccagcttggtgggccacttggccgcgagcttcgagctctgcttgttctgggccagcagggacaattcttcttccgaaaccagagcccagtgcctgctgctgagaggaggggagggaaggttgtgagcaagcgcagcgcccactgggtggccccggagatggggctgggaaggaatcgctgcgagggggcgaggggaacagcctgcctctcagttgtcccaggtgcctaagaccccccccccggaacccccgcctgattctgggagtttttctcatggaggtggagtgagcaacaggggaccagatgactcccttgcctcccgcctcccccggccgggggctggtcccctgggaagcaggctgggggtcactccgtgtgaacagcgagctccagggccatcgctagaggatgtcaccatccctgggcagcacccccgcagaggaaaggacaggactctgggcaaaagttggccaaaccctcgcagagtcagcgagcattcccagggaattctatcacaaaggccgtcccctgggttcctggggctgcctgtgccgggagccccagccctgggtgcaggagggcaggtggtgagaggaaaggtcccctgccagcctgctgtgaggagcccttgaggaagacgggctttgcagacttggcaccaacaccccctctcctgctcccagccaccccactggaggccaggaacatttctcagtttattttggggtgaagactgcgagtgaagtgccagatacagtgtccccctcctcctcctcctcctcaggcaccctccctagggcagtggggactgtccttaaccatcctgggggtgatggtggctacctctgcaaaaggatttctcctttcagtgagtgggtgtctctcatgtcactgttgagacacccaggagcctgggagggaaacctgtgggaaggaactgccagcctccttctgggaaccaggtgaccccaggatcacggctcaggtggatccagccctcgaaaccctgtgaggagctctgtggagcctcgctcagaaaggggggctgggaagaagcagctgccagcccacagcccaagcctgcaggggccacaagtgtggccactggagcagagggaggtgccttttgtggagcagcaaccctgggtctggctgcacctgccacttaagaaccctgatggggcgctgttctcactgctgtgtggacgcatagagcctccgggggccaaggagcctctggggccaggcagcaggtgaggcatggcctgtaatgcacacaggtgttgctgggtctgcccccaccttcacccccgctcacccagccccacagagcctggcatggcctcccaggaagtgacatggcggggaacaggcttagggttagggggaggctgtgcgaaggctggcatgcaggtgagagggcttctgaagagaaagcatgctggaaaagtgcttcggctcagccccacccaaactcaaatccaggggaagccaggccagcaagacctgcaggtgccatgccttggcaggtgccaggcaacaggatcgtgcctcggtggtgacgtgggagatgctggaaccggggaggtgagagggagtaagtttccagaactcactctcaggcaggaggagatcatgactcagctgagccagaaagcgctcgttccacacgaatgcacgtatgagcgaggcacgccaggcgagtgtgggagtgaggggatggatgggcggttggctggaggtcgtgaggtctgggccgcctggaaaggctgttgaggggcgggggcagctgggagaggctgtgggggcagcagaagggggtgcttagccgcagagagggcacgtggggaaaggccatgtgttcaaggccccaaaaggtggggagggcagcccaggagtgcaccgcagggggtgcaagcgtgtgggtgggtgagactgatgcgtgtgtgcctgtgtgattgtgagcacatgtgaacgtgtggatgcaggtggtagtcgtgagtgtgcttgtgtgagcatgtgactgagggagcatgtgggtgtgtggatgagcgtgactgtggggatgactgtgtgtgcatgcatgagcacacaggtgtgtggatgagcgtgaccgtgggaatgactgtgtgtgtgtgcatacatgagcacacaggcgtatggatgagcgtgcaagtgagtcatgtgagtgtggctgagtgtgagcacgcatgagcttgtgggtgtgcaagggaggtggggaggccacacggaatgaaagcctgggggctgcagccgattcagggccaggccgccatggcgcatatgggtgtccaggggctggaccccgagaagctgagagccagtgctggagaagctccccaaggggaaaggggcatcctcaggcttcggtgtcttcagggtctcagggtggccccgaaggccgaccgcagtcccactggggcgcagaggctgctctgggcttggctctgctagacagaccccatttcctcagtgaaccccgcttctgggtccatgttccccttgaccctgaacgctttcagctgcccaggaaatacctccttatggctgggatgttgctccacacgcggacagcattctgcaaggatccgccgtggacatctgggatggtgactggctccatctgggggcgggagggtcggccgtgggtcaggggacctggacggtaagcgccccccacaggcccactggcctcagccgccaatggccctgagtggtcaatggactttctagcccgactgtgttccctacgtccttttttcttatgaatcacctttggagaaaaatgctgatgaattattttaaactgacagaacagactctgtggcaataagatatcaaattacaaacaggacctcaggccgcgccaggcaagggtcgagccgagccgcgtgccctacactgagaggacggactctgccctcacgccacagctgctgctttttctgcagcggctaaacacgcactggccccgcgatgaggatgagcaaggttcaaatgactgcagctcatccacctgcagatgccaactgaccacgttccacagccatgaccacagctctgactgggcaggagactgacttcaggaacctcctcctgataagggaccccgaccacagactggctccggccggtttacagaggttgtgcgcttgagggcctgtgtcctgagaagacctctgaggtttagggcctcattgcgacacactgacatgataagactccaccccggagtgaacagaggtcgtaagttccacggattttgttcagtacgcacgcagcaggacccccttcatgaatattcaccgctcctccataacctgccgcacaggtttagccaacccggtcagcacggagctcctgccccagccacccctccccttcgaagtgcctcctcctggctcctctggtcttggtggaggccccgtgcttcccagcctgggggacgggaccttgcaggctgtgcccctttacagaaacaaagtctcctgttctaaaagcacagactttgtgattttcagctcatggcgtttgctccccttctgaatagctggatttgcattccagccactccacgagattccagcaccaaaggaacctcaacgccacctggacccccagcaaaggctctggcccacaggtgctgcccactcggtgggtcgggcccccgctggctgtggcccctccatggaacctgagagcatgaggaaattccccctcctgagcctcacgcctgtctcctgtggctgaggtgtggccgtccctccccaaccctggaagtgtctggaacacccggcccatcagccccagaggggacccatccgctgagtccaaaagtggctgctctgacaatcaggattcagacgtgtgaagaaaaggctgtatgtgtgtggtgtgagtatgtgtgcacgtagtgtgcctgtgtgtgtgtggcaagtgtgtccctgtgtgtggtgcatgtgtacagtgactgtgcactgcagtgtgtgtgcacctgtgtgtgtggtgtgatgtgcgtgtgtgtgggtggagactgagggggcaggggcaggaggtgagcccccgaggccgtgttctgtgagcacaggagtggtgcgaggtgggactgccctcccatgctgtccttgaaggggctttgtgtcccaggccgcagtccctgcccggactgcacagcagctctcctgggccctgtacacacctggaaaccaggggccgcaaggagccaggcccggagcctggggtgtagactgagctccaccagaaaagcccctccctcacgtgggcaggggtcagagggcggcccacgcagccctgcacgcacctccaggaagcgagatgcgacgtccaggtcttccttgttcagcaccagattgtccacgaacatccagaagaagggcctggggctgcctggcttgggccgtgcgtactgcaggagccggtggaactggaacaggtaccagcctggagtggggtgagggggcagggctgagggggggccgggggggctggtcatggggacgctgttcaggtgcatctgggcaggggcctaaggaaactggggcttgagagaagggctgagggggtcgaggggacgcaccggcctgggtctgagggatccccctgcccctgtccctccagcagcaatgaagccctgcccagtgctggggccacagaggtgcatggacccctcctcccccaggcaggcctagagtggggaagagacagacaggcaaccccgagggaggagctgacgcagagcgcgtgccgcggcacaaataccgccttttagaggaagctccagaggacacgtgagctgcagtgatgtgggcacgctgggggctgcatggggtcagcgggaggcttgggggcacagggaagcctgcagtgatggggactcttactctgttgctctcttactctgatgaggggtgcatgggtgtggagctagctcagaactcatccagtcggacacactgaatgcgtgcaacttactgtatgtcagtggtgcctcgataaagctgtttttgaaaaatgctgacaatttgcagtttctgccctggcatggaggtgtgaggagagaggagaggagacaggggtggtggggacaggctgccagaactgaagcatcactcactgggaggacggtcacaggtgtggcccaggggaggtgtggcgccgtacacaagatcgaagggtccccactcctccacctgcaggacagaggggagtgggcactgagaggcagcagcagtgggcaaggtcgcgtgcggcagcacgagatgaccccagggcagaccctgctcagctcgcagggcccacaggccagggcaagctgaggagtggagcccactagggcagagccatccacagccaccaccagcctcaggggctgcctgcctggagcccagaggagaaagctccgggtctgaggtgaagactctgtgccatgcatttggggactgaattctgcctttattttttcttgctcaaattcctttctaaggagcgtaggggaatcacgccttacaaaccacaaaagcttgtggaatgggtgtttttgacctggtatattgtgactctgccatggcaccacatgacagacagcagacctccttattttaactcaagcattcctttctactgactcccagtttttaggcaaagctcaactctttcaaccaactgccaactaaagaatccctaaacccacctataacctgtaagcttcaagatatctcgccttttggggctgatccaatgcacatcttctatgtattgatttattgattgattgattttttgagatggggtctcactctgtcacccaggctgtagtgcaatggcgagatctcggctcactgcaacctctacctcctgggctcaagcaatcctcctgcctcagccccctgagcaaccccaggtgcacatcaccatgactagccaacttttttgtatttttggtagagatggggtttcaccaagttgctcaaactggtcttgaactcctcagctcaaagtgctgggattacaggcgtgagccaccgcgcccggcccgtgtactgttttctgattccacctgcagttcgcatctccctgaaatgtacaaaaccaattgtgctgggagtggtggctcacgcctgtaatcccagcactttgggaggcagaggcgggcggatcacgaggtcaggagattgagaccatcctggctaacacggtgaaaccccgtctctactaaaaatataaaaaaattagccaggcatggtggcgggcgcctgtagtcccagctactcgggaggctgaggcaggagaatggcaggaacgcgggaggcggagcttgcggtgagccgagatcacgccactgcactccagcctgggcgacagagcaagcctccgtctcaaaaacaaataaataaataaataaaataaaaataaataaatacataaaaccaaattgtaactgaccgcctcaggtgcacttcctcgggatctcttaagactgtatttcccaggccatggtcactcttattggctcagaataaacctatttaaaaactttggcagaatttggtttttctgtctgtcctcacattgcccttagagaaccagtcctgggaggcccaacatgcagactacctagggaagtaactgtcatctgtgaacacagcaggtgccgtccgcagccctccaggagctaacagcaagggcagagccttccctgctgaacagaaacagcccccacagagtagctccctggggaccacagagtaggtccccacaggctattccatggccgagctggaagaagacaaaacacagccacccaacaatcttgcctgaacacatgcccttcagtcacaaaaagtgaccaaggggaggctgtgagcaacactggcttcattaacagtgatggccctcactctgtcattcttattaaataaaaattaacagctggacgtggtggctaacacctgtaatcccagcactttaggaggccaaggcgggtggatcacctgagatcaggagttcaagaccagcctggccaatatggtgaaaccccgtctctactaaaaaatacaaaaaattagctgggcatggtggcgggtgcctgtaataccagctgcttgggaggctgaggcaggagactcgcctgaaccctggaggcggaggttgcagtgagcccagattgtgccactacactctagcctgggcaacagagtgagactccatctcaaaaacaaaaaacaaaaaagccccccaaaacttaagatagtcaagtatcagaaccccgtctcctgatagcaccagtcaacaatggactccacttccctggaccccctcaaatcacataacagcccgaatcccattagccccaaactcctcatgcctccggggcatcattttgtgtccttccacgatgtagcaagtggataaacctaactgttgatggcaggtgcaacctgagggtctccgagtgccgaaaaggcatggtggggtggggacagcggaggtgagggggggctgctggtcccaggccgggagcccccaaaagacctgtacacaggtggctgctcatgcttctctcacagtggcatgggaaggcaccaaggcagcggggaatctggcctacagggggaacgcacgactggagctgtgtcacctccttccagcagcgggaggatgctttcaaacagtgaccagttgtccaggtcaaggctcggcctcctcattttagagggtggagtgggggttcagcccctccttgccggacagcgccccatcacaggcagtggaatttggctacttagatttcaagatgttggacaagatgtttgcccaactgccctgctctgagctctgggctctgggctctgggcaatgctgggaccaccaaaacgtgctgctcagccctccgctgcggggcatcacagtggtggctgggccggcggggttgggctgactcctgtcagacccaggatccccaccaggctgccgagaggcccccgtgtgttcaggactcctcccagcccctgctgccgcctccttgcccgcctcatccttggcatttcctctgaggaagctcgcacccccgctcccactacagtgtctgagagttcacggcggtactcacatccttcctcactgtgtctgtgacatcaaccacatgcttcagttgtcccgggtcagaaccactttccaaaaagcccaaactcgtcagctctggatggggagagaccagaagggcccagagggtgagcgtggattgtgcccctacagggactcgaaaaggctgacggacgatcagaggaccctcctaccattaaggagccaactgtatatttttgttgttgttgttttgagatggagtctccctctgtcgcccaggctggagcgcagtggcgtgatcttggctcactgcaacctccgcctcccaggttcaagcggttcccctgcctcaacctcccgagtagctgggactacaggcatgtgccaccacgcccggctaatttttttgtatttttagtagacacagggtttcaccatgttggccaggctggtctccaactcctgacctcaaatgttccgcccacttcagcctcccaaattgttgggattacacgtgtgagccactgcaccccgcccaactttatctttttaatgacgtggcaggaggattaaggatggaggtttttgtctcacaacaagctaaacaagcaaacattgccaagtattgatttaagaatgtcaagcacggccgggcacagacgctcaagcctgtaattccagcattttgggagtccaaggcggatggatcacctgaggtcaggagttcaagaccagcctggccaacatggtgaaaccctgtctctactaaaaacacaaaaattagctgggcgtggtggtgagcacctgtaatcccagctgctcgggaggctgaggcaggagaattggttgaacccggggggcagaggtgcagcgagccgagatcaagcctgggcaacagagcgagactccgcctcaaaaaaaaaaaggatgtcaaggactgtattacagcaccaggcatttctgggatgcgatgtcacctctggctaggaaatccacagagcagtggagtccactccactctgcagctggtgtgagctgcagagccctggaacggccctggaggaggccctggctttctcagcccctcctgggcagcaagaccttggacaggctgtgcaggcgctgcgggatcaggctcctgatcggctgcatggggcagatatgtgctcccgcatgaggccgctctgagacacttgtgggccttagtgggtgtcccagcgggacacatccctaacggccagaggagagggagtgtcttcatggatttggctgtgcctgcggggcccagaagacaagtgccatttccaaaggccccagtgcagggttagcatgggcccagggtggggaagggtacaggacatcagcagttggccggtctaggggagggggtggggagtcccggggggtggcctgaggggcagtcaggtgtttagaggcatctttccatgtgtgtctttgggacatcactgactcacctttcttgatgtcttcaaaaagggacagcacccggactggctgtctcctccacacaggcacggtttcgaacatctcaaggggattctcctatttattaaaaaaccaaaacaggacattgtgccggctacttggctacagagcccttgagttacaatgaaaattcttccctggatgaacactcactcgagactcaccggagacacacataagacacacctgctgaggctgactgggcctgtcctgaccagcactgcccccccaggaaggccaactccaccccctgctccagcctcagtctcccgctctgacctgtctccagccgagagacagtaggtgtggaggggtttgctgattttttttttttttttttttttgagatggagtcttgctctgtcacccaggctggagtgcaatggtgcaatcttggctcactgcaactttccgcctcccgggttcaagcgattctcctgcttcaccctcccgagtagctgggatcacaggcacccgccaccacgcccggctaatttttgtatttttagtagagacagtttcaccatattggccaggctggtcttgctcatcctggcagcttccagaacctcggagaagagagccccaaggccagagatgccggggagaggtgagcctcggggcaggtgaggcctgtggttttccctgaccctgccaacctgatgggctaggcgggcagccagctccagcctcacatgctccctgttaaagggccaacccccaaggcccaaaactcgggggcctcggctttcagagtgctaggctctgttcctataaaataccttcccatctgaccctttccttcgaattggagcaggctgaagcttgctaggcagggagagatgacttcgttcaaccttaacaaatgtgagctggaggccagtgcagtttcatggtcagctcaggggtcccttgctccccgctggctgcctcaccgggggccacaccccttctgtaggagcttcccgtggctggcctgcaaattaaaacagactggaggggctgggcccggtggctcatgcctgtcatcccagcattttgggaggctgaggcaggtggatcacttgaggtcaggagttcaagaccagcctggccaacatggtgaaaccctgtctctactaaaagtacagaattagccgggtgtggcggtcggtgcctgtaatcccaggtactcaggaggcaggaaggagaatcgcttgaacccgggaggccgaggttgcagtgagccaagagggtgccattgcactccagcctgggcagcaagagcaaaactccatctcaaaaataaaaaaataaaaaacaaggccggtgcggtggctcacgcctgtaatcccagcactttgggaggccgaggcgggcggatcacgaggtcaggagatcgagaccatcccggctaaaactgtgaaaccccgtctctactaaaaatacaaaaaattagccgggcgtagtggcgggcgcctgtagtcccagctacttgggaggctgaggcaggagaatggcgtgaacctgggaggcggagcttgcagtgagccgagatcccgccactgcactccagcctgggcgacagagcgagactccgtctcaaaaaaaaaaaaaaaataaataaataaataaataaataaataaaaaacagaccaggggacttggcacagcagaaattattctttcacagctcaggaggccagaggttttgaagtgaaggtgtgccggcaggcgtgcctccctcagaaggcgccaggcaaggacgtgccaggcctctcccccagctcctggggctgctggcacccatggctggtggacacctcactccagtctctgcctccatcatcatgtgactgtcttctccgtctccatttcccaaatctcttacagtgacactagtcgctgcattgagggcccaccctaaatctggaatgatctcatctcgtgatccttaactaaattacatctgcaaaaaccctgtttccaaataagatcacattcacaggtaagggatggagacttggatgtccctctcagagggacaaaattccaccttctctgcctttgtctgaggttcctgccggcccccctggctcctcggctggactcccaaaacggcccacacctggccagcagaagcccaggcacttgctcctgaggactggactttgagacgtgccagccaccctctcccggcccctctcccatctgctaccagggcctcgttcctaggcttggaagcaacaaaactgccaaagcagtttacccaaagccaccatcgagtggaagccactatcggagaggaacccaggaaagagtgtttgctcccgaggctgcagccgtggtgcccgtcggcgcgcctgcattctgcagcgggaaccgagggaaggccgtaagtcagggcctgctgctgccgggtgctgcccctccacgggctccttaccgactctcggtcgtagaaggccttgagctggctgcgccacttcctccgacgctgcagcagcccgcttcgggaggacggcaggcacaggtagcacacccagttgctcatggcgtgcaccttccccgaggtcccggggccgaccaggctatccacacactcgaagcagtagcatctaaggccagacagaaaaccacagcagcggacatgacagcccacctctcctgaggatggcagaggtgggcctgattgagccttgttttggagggaaaagtcacgctggagctccctttgggaagaccaggtggtggactgggaagagggagacggtccttcctagagacgcagagtgacaggagccgagccaggtgcagaagacagggaggtggattcacaggcaatgacagatccaaggaaccccctaagccacctgtctgcccccaaactcgagcctgcagaaacagcgtagggactcccagcaaaaccaaatgtagcaacagcagctgggggagagaacttgaggagtggggagctgtaaatacgaggatggcccagaaggaccgaggagaggagcccacggagggagccgaggcgagggagtaacgactgaggggtgagcataccccttgtcaccccggtcatgactggcagcctggggtgtggggtttccatcgctcccctgcacagcgatgtggcaatatcaacaccgaaaagaaaaatcacaatcgccaaccgtagacacccgcctcccatagctcagggctctatgccaaatgacgcattggagacagaaatcagaagctctcagggaaatcatccatttgggaagaaaatccacccacactccagaatgagtagctgaaaggatgggtgtgtcctcagccccttcacccccctgggcaggcccctcgcctcaccgggtgcaatcagggtttccgcagatgagcagcgtctctccggagcagcagatggagcagtaggattggtacccgtcatcgtcgtacaggaagagggcatccaggaacttgtccttggaaggagcaaagcaaggctggcttgtgtcatccctgctctgaggccatgagggagtcacccccagcctccctgcctaccttacatggggcgcagatccctccctcaaacagagggtgctgtgtgtgaacctggagacttccgcagcagatgcagatgtctaaaggaaacattcaaagcacactgtgttttcccagtgctgtcaaatacagcagacgattaggaataaatttagccaaacaaatatgagacttatacactgaaaactgcaaagtattgttggaagatgttaaggaagatggaacaaaatggaaagatatcccatgttcatggatcagaagatttaacattggctgggtgtggtggctcatgcctgtaattccagcactttaggaggctgagcaggagaatcacttgaacctggtagacagaggttgctatgagccaagatcatgcctctgcactccagcctgggggacagagtgagagtgtgtctcaaaaaaaaaaaaaaaaaaaaaaagaagaagacttaatattgttaaaatagcatgagtccccaaatggagctgcagagccctctcaaaatcccagctggcttttgggcaggagttgacaggctgatcctaaattcatacggaaatgcaaaggatccagaaaaggcaaacccacgttgagagaaagtcgaggagtggttgcctagagttaaaagaagggaagcaagaagggggaatttggagtgactgttactagacatgggttttcttttcagggtgatgaaaaccttctaaaattagatggtgatgatggttgctgactctgtaaataaactaaaatacattaaactatatgctttaaatgaagctacaggggccttgggagggggagaagggatacacgtggcacagtggtgtccactgcctccttccaggatctcaccgtcacccaggctggagtgcagtggtgttatcatagctcactgcagcctcgacctccccagctcaagcaatcctcccaactcagcctcctgagtagctgggactacaggtgcatgccaccatgcctggttaatttttatttttatttttttgtagagacagagtctcactatgttgcctaggctggtctcaaactcctgggctcaaatgatcctcccacattggtctcccaaagtgctgggattataggtgtgagccactgtgccccgtctcttttgtctggtgtgggccagtatgcaaacactcaccttctatatttcgctggttagccttgacttcatatgcaataagatctggaaaggaagataagaagtagcccctttcttcttcctctgatctcttaatttaaattcggccaggaagtgagcatcacaattcgttttccaaagtcacaggagcctgaggtcccctgccatcccgccctcacaccttatcttggtgtgttaaacgcccatacctgggggaagactgtgggtggggaacctcctgccccagcccgggtgcctgaataatgcatgaatactccagaagcctggaactccagacctcatccaggcctgggatcagcatcctaagtgactggtccaataagcagatgagccctcacctctgcctgtcccgggtgaaacggagcttgagagctcactggatcccaccaaaatcacgtccatgctgggctcggcctctgggtccagggctgggatggccgccatggggatgctgtgtcaggacacacggacacagatgtgagaaagccgtcagcccctgctcagatccctgatgcaccccagcacgggaagcagcttgctgagcagaccttgactagttcaggccacctgaacccccgcggtgacacccacctgcccaacccagggatgaggggcaggacagccaaggccagtgccagccctgagaggggctcaagggtcccctgaggcgtgccccccacctgcctggccctgttacaacatggaagatggggcaaaaaggggagggcagggccctcatgaggacctggggccaatggccgctgcagcccctgctttcctctgggcccagccttcgacccctcagggactcccatgccccagcctcctacagtgtccctcaggcccagcagggacccctggggatggtcttggccagccgcacccttgaaggcagcatggtcagggagtaggaaagagactcacagggctgctgccacggctccgggtacagccagctggtgggttcaaggttccagtggtccggggcttccaggctcagggtccccggggaggactgggccatggaacgagggacggcgcaggcaaagaatgagctggaaggatccaggcccacctgggacagcgggtggccagaggtcaccaggctatgggggcaaagaatctgggcgtgtcccgcgggggcggggaggggcgggggcggggcagcccttcagtgccggtttgcagtgggaggggcgaggagctgcggggggtcacttggggtggggagctaggaagctgggggacgggcagggaaagggaaccctcaggtggggagggttaagagctcagtggggctgggggattggggttcagaggatggggccctcagggtggagtgaggggtggggtttggggacctcagtggggagtggggttcaggggaggggtggagatgggaggactggggatggggcagatgaggggggtttcagtagaggggggcccttggggtggggtgggggataggggtggctgtggggtaggggcagggcgctcagaggtggggtttaggaaggtcataggggtgggcttcagggcaagggtgaagaaagggatgagggtggagggtggaggggtggaggggtggagggtggagggtggagggtggaggtagggcagggcggggggttaggtggagttggccccctgggtggagatgggtgaggattagtggaggtggccctcagggcagggtgggtgggtggagggcggggcttagggagatctgttgggggattagggagtgggggtgggggtggatgctgagttggagatgggggccttcaggggaggtggtcctttggcgggatgggggtgatgatagggtgagggtgggcactccggggcagggctcagtggcgggggtcggggctcagggcaagggtagagacggggtgaaagtaggaatgggggtgtgaggccgaggatgggggtttcaggggaggtggcctttagggcaggataggggtgagaatggggtggggatgggcctcagggatctcagggtcggttgggatgggagtgggggtgggggtagatggtgaggaggagatgggggtgttcaggggaggtggtcctctggcgggatagagggaggggcgttcaggagccgggcttgggagctcagtctggagccccaggtttggggggcagctgtgggggagagaaggaaacagggaaggccctggaggatggggtaaggggtgttgggtggggaatgtcagggcaggtggggggttggggagctgggaggggtaggttcagggtgggggtggaacgtggaagcagggaagggagcaggaaggtggggtgggcagaggggcagtgtgggaggtgcggggtgggttgggaagggggactttgttggagggaggttaggggcttcagagcagggggcggaggaccgccgggcagggctggagccacaggacaattgtgctggtcgaaagtgggagaagacccttgcgggaggtaacccccctgaagtgtgggctgggcctggtgacttccttctgcaagtactgcatgaggggtgaccacacaggggcagcctgatgaccccttggcccctggcccaggccagcgtctcggggaggattcgcctgggtgggtgccccgcaccggggctttctccccccacccacagcccagcctctccaggagtgaactgggtcggagcagaggcggcccagtgcctgagccctcctcactggggcagtcaggccgcccagcgggagagtctgaaaaacagcggggcagggggcggggggaccctgaggcactgcgacaatgaagtgtcacatgggatcccgggacagagaggggcggtagggagtgggaaatctgaataaaatgtggctccttggctctaagttggtgtgtctgcaggtttgttcatgtaaccacagtgtccatgggggcctgagggctgggtgggggttgcggcagttctggactagcgcctcaaggtttgtataactttaaagctgttctaacatagttactttttttaatgaaaaaaagtgaagggagagaatactgaggatgacagtgagatcacttccctgtgtttgagtaaaatgatcttgttttctcctccttttattccaaagagctttgtttttcaggagctcacgggattgaaagtgattagaaggagacagcgggagcagcaggcccatctgtcccctgaccccagccccacacccaacctcccctgccctgcagggctgttcccaccagcacaagtggaaaggggagaattcctgggggctggttttggctccaaggaggggcagttttcttttttctttttctttttttttttttttttgagatggaatctcgctctgtcgcacaggctggagtgcagtggcgccatctcggctcaccgcaagctctgccttccgggttcacgccattctcctgcctcagtctcccgagtagctgggactacaggcgcccgccaccatgcccggctaattttttgtatatattttttttttttagtagagatggggtttcaccgtgttagccaggatggtctcgatctcccgacctcatgatccacccgcctcggcctcccaaagtgctaggattacaggcgtgagccaccgcacccggcctgtttttctttttctttttcttttttttttgagacagagtctcgctctgttgccaggctggagtgcaatgacgtgatcttggatcaccgcaacctcagcctcccaagtagctgtgattacaggcatgcaccaccatactcggcttttgttttgttttgttttgttttgttttttgaggagtctccctctattgcccaggctggagtgcagtggtgccatctctgctcactgcaacctccagctccccggttcaagagaatcctcagcttcctgagtatctggggttacaggcgtgcaccaccacgcatggctaatttttgtatttttagtagagacaaggtttcaccatattggccaggctggtctcaaactcctgatctcgtgatctgcccaccttggtctcccgaagtgctggaattacaggcgtgagccaccgcgcccgggctgccaggctaattttttgtatttttagtagagatggggtttcaccacgttagccagtatggtctcgatctcctgaccttgtgatctgcccgcctcagcctcccaaagtgctgggattacaggcgtgagccactgcgcccagcctatttttcttttcttttttttttttttttgagacagagtctctctctgttgccaggctggagtgcagtgacgtgatctcggctcactgccacctcaccctcctgagtagctgtgattataggcacgcaccaccatgcccggctaatttttggggaggggggtctcgctctattgcccaggctggagtgcagtgctgccacctcggctcactgcaacctctgcctcccaggttcaagcgagtctcctgcctcagcctcccgagtagctggggttacaggcgtgcactaccacgcatggctaatttttgtatttttagtagagacaagatttcaccatgttggccaggctggtctcaaactcctgacttcatgatccacccgcctcagcctctcaaagtgctgggattacaggtgtgagccacctcgccccggctgcctggctaatttttgtatttttagtggagacggggttcactatgttggccagtctggtctcgaactcctgacctcaagttatcctggaagggcagttttcttttttctttttttcttttcttttctttttttttttttttttggagatagagtctcgctctgtggcccaggctggagtacagtagcaatttcagctcactgcaacctccgcctcccgggttcaagcaactctcttgcctcagcctccctagtatctgggattacaggtgcatgccaccacacccagcattttttgtatttttagtagagacggggtttcaccctgttggccaggctggtctcgacctcctgacctcaggtaacccgcctgcctcggcctcccaaggtgctgggattacaggtgtgagccactgcgcccggcttccggaagggcagttttctaacttcacaccccagaacctcctgcagtaaaggaaggttctgtccagggcgggtgccctggcgtaggccacaggacaggaagcccctcgcatccatcagagcccccagtccccgtgcaccccactgctgctcagcagagaccagagcggtctcagcaggagagaggcccggtgctctacagatgggccccagaaaagctggcctctcatggggagctctctgggagctcagtccctgaggccaccactggcatcggcccctgtgatatacccaccagcatgcggaccacaggtgctggtcactgggggacctctggcctcactctccatgccccagaaagccccaaggacgcaaacgtggcagggtgggccttaaagctccccaagcagggctacgggggctggtggagcacagtccccgctgtgtggctgccccttcctggcactcatggatgcatctggagtcttccttctgcatgagctcccatgtcctctccagcctggaagccacccgtgtgctggcttgatggggtgacccacagctcactacacattgatttctcttttttttttttttgagacggagtctcactctatcacccaggctggagtgcagtggcgcatctccactcactgcaagcttacgacattctcccaagtagctgggactacaggcgcccgccaccacgcctggataatttttttgtatttttagtagagacggggtttcaccgtgttagccagtatggtctcgatctcctgacctcgtgatccacccgcctcggcctcccaaagtgctgggattacaagcgtgagccactaagcccagcctacacgatgatttctgatgctgttgaccctaggggtctggaaaggcccctgtgactcaacctggccttggcctgggcccagctggacccggggtggccacatacagccagggccatgagggtcaggaagaaaggacaggatggcagcctccactgtggaagccccaggagcctgggggtggtcactgaagcctcacccagacctgatggccaatgcactggaccccagcaggggctgccgcttctcccaccctccagaaggcactgtcatgagtgtgcttgggaacagggtgcatagtcagattgtttgggacacactgtctgcccctcacctgcttggagggttgtgatttacatccctgcgtgaagtttctgagaagcacataggacagacacccttaatcaatggaagcccccatctcttccaaagctgcttctgcagagagccttcccttgatggtgcatttataaatggcacgggaaactttcagaaaacacccatgtgggaaatcgcactccagaagtgggaagaccgtgcaaaccatcttctctccaggagcccgtgatagtgcgaggactggcgccgatggcccgctgggggctggggagccccggggaccccataccgtgtgccctctgccctccagcccatggtgcggaagacactgtctcacctctgcttgatcaatctatagacagcaggagccaaagcccagcatctggagacacactcatgtccttgggcctctgaggggcagactgaggtggtgatcacggcaggcgaaggggacgtggtgacccctccacattcagtggccacatcgagtcacagctgtagtggggtggggggtgatacgttttgtgtttgtggagtgaatgaacgaatgagcaaacattcatttttctcctgaagacaaagtgccgctggagttagaggtggcgtgagctcttgcgtctcctgatctagagaggactgcaaggcgccccagggcccatgggtccccagactgctctccagcgccacacccaggcctgcggctctctcaaccttggatgaagctgatgctttaatattgagaaagacaagcctgggagtgggcccagcgcccacagtgaggtcctggttctctcctgcagacgtcagcagcctcacagagcaggcctcagacaaggctgttcgggacaataataaaacgagtgaaaaaataaggccacttccaaatcgtggctcccacaaaaacaaggtcccggggccacccacaaaaatgaccgaatatccccctctcctggctgaaaggggtgcgtgaagcctcttcccgggccatagttggggttcactgaggctccccattgaagaaccacagcgctcctagccgagcccggtccagagctgccacggtgaacacggtcagatagtcagggacacgctgtggtcacagttggcacctttgtattagagtctgagaatcccgaaatactacatctgcttcacccgttaaattatccaccatttcccccaaacctactaagtaaaggaaatttcctttatggtacatttataaaagccatgtacgaaattgtgttctggaaaacacgagttttatgatgttcgcatatgtcacatactttcatagctcaatattcaaaagctgcaaagtgggaacagtgaaatggtgctggattgtgcagcccccaatgctactgaactatgacatgaaatctctggcaaagcttaagtctctcttctctgttcctttcattttctttgtaacccttgcttgtttttttcttattaatttgaaagcctctttatatattaaagatattgactcatataatcctcgtatacataagtcacaaatattttcttcagcttgttaatctattttaatgtttaatggcatttttctatgcaagcatattacattatcatttagtcaggtccatgagtctttttttttttttttgagaaggagtcccgctctgttgcccaggatagagtgcaatggcatgatctctgctcactgcaacatccgcctcctgggttcaagcagttctcctggctcagcctcccgagtagctgggattcccggcacgtgccaccatgccaagctggttttttttttgtatttttagtagagacagggtttcaccatgttggtcaggctggtctccaactcctgacctcgtgatctgcccacctcggcctaccaaagtgctgggattacaggtgtgagccactgcgcttggccctgtctacgagtctttttttagatttccattcttcctaacatatttaaaaagttcctcttcaccccaagatggtataagcatgcacctttattttctttggatattttatttcattttttccatttcatcatttcatgtcttcatttaagtcattttatgtattaattctaattggaataattttagtgtttgccatggcttttgcgaattactatccagttctctcaagatcacttttgaatacgccctccattccctgatgcattcaaaaccgtgtgtcaatcacctgcctctctgagtgcctgggtctcaggctttgcatttctctccaggggtgtgtcagtttctgccttggagctcctgccacgctggctgtagctttataccatgtttaaacaccccgcgccgtgtgacagtcttcagaagtgtcttgtctcgtgttcactcaccttccacaagaacattaaatcaagttctttgaaaaatcccattggtaatttgattggaatgaatggtattagatttacacactaattaaggaagaactgacttgtaaaaatactattaagaagttaaatccaggccgggcaccgtggctcacgcatgtaatctgagcattttgggaagccgaggcagatggatcacctgaggtcaggagtttgagaccagcctggccaacgtggtgaaaccccatctctactaaaaatacaaaaattagctgggcgtggtggtgggcacctgtagtcccagttacctgagaggctgaggcagaagaattgcttgaacctgggaggcagaggttgcagtgagccaagattgcgccattgcactccagcctgggcaacaagagcaaaacttcgtctcaaaaaaaaaaaaaaaattaaatccaggcacacacaggggctcacacctgtaatcccagtgctttaggaggctgagctgaaggatttcttgaggccaagagttggagaccagcttgggcaacatagcaagaccccatctctacccaaaatgaggtgggaggatcactgagtctaggagttcgaggctgcagtgagccgtggtctcaccactgcactccagcctgggtgacagagtgagaccttgccaaaaaaaaaaaaaaaaagttaaatctaggaacatgatgtatctttccatttctttcctctttctttttttttttttttttgagacggagtttagctctcgttgcccaggctggagtgcaatggcgtgatctcggctcactacaacttccgcctcccaggttcaagcaattctcctgcctcagcctcccaagtagctgggattacaggcatgcaccaccacgcctggctaattttgtatttcttttagtagagacggagtttctccatgttgaggctggtctcgaactcctgacctcaggtgatccgcctgcctcggcctgccaaagtgctgggattacaggcgtgagccactgtacccggcctctttcctcttttttttttgagacggagtttcgttcttgctgcccaggctggagtgcaatggcacgatctcggctcaccgcaacctccacctcccgagttcaagcgattctcctgcctcagcctcccgagtagctggaattacaggcatgcaccaccatgcccagctaattttttgtatttttagtagagatggggtttctccatgttggtcaggctgatctcaaactcctgacctcaggtgatccccccaccttggcctcccaaagtgttgggattacaggcgagagccaccgcgcccagtctctttcctctttttaaaaaatgttgagtacttacagcagggtgcagtggctcacgcctataatcccagcacctgggtgggcagatactcgggcccaggagttagagaccagcttaaccaacatggcaaaaccctgtctccactaaaaatacaaaaattagccgggcatggtgacacatgcttgtaatcccagctactcgtgtggtgaggcatgagaattgtttgaacctgggaggcaaaggttgcagtgagctgagatcgcaccactgcactccagcctgtaggacagagcaagactctgtctcaaaaaaaaaaaaaaaagtgagtattcactggtattgtgaatatttttccattatattttatttcccttttctttcttttcttttcttctcttttttttttttttgagacggagtcttgctctgtcgcccaggctggaagtgcaatgacacggtcttggctcactgcaacctccgcctcctgggttccagcgattctcctgcctcagcctcctgagtagctgggattacaggcacctgccaccatgcccggctaatttttgtaattttagtagagacggggtttcaccatgttggccaggctggtctcgaactcctgacctcagatgatctgcccgcttcagcctcccaaagtgctgggatcacaggtgtgagtcactgtgcccggcctagttcctattttaacatcagaatgaatctatgcatgtgtctacaactgaagccacgcttatgcttacagattaaacagtggcacgctggaccccacgcagtctgagccctcggtcccggcttcccgttactggctggcccattatctgcggagagggacgcccggtctctcacctgcccccactgagggacatttgggtagtttccgttcttttgtcctccctcttaatctcaggggactcccttccagccccgaaccaggccacattctcctctattctctgtgcctcagcaggccaggaacaggtggggacatgggtgtggaagggacgtccccagagcaccctggcctcagtgcccgcttccatggcctgcagtggctcagaaacagcacaccagagacccggaagggctgaggaatggctggagtctgcctgggggctcagggccagggctgaggatgccggaatgggggtgcctgcagaggccctctgacctggagactccctgtgtgttttctgcacacgttactatcactcaagggttggcacctttccccagcactaacccatcagcacatctggggcctgctccccttgtctctggccgggtggagaggctgagggagccatgttgtttctcttgtccatgcagtgggtgtgtccagacctgctccagggcaggccctgggcagacgctgggagaaagccagccaagtctctgggaaaagtggacccaccaggcagggctgcggccccgaggccaagtgggctagggcgggttctttgggaacctgggatagccaggggaccctgcagagatacaggggtgaggccagaaggcaggcctgctgggcagagggagggttcctccatggcagggaacagggactggctgcccggcaaaaggccagcaatgaggggctgggaagtcaagctgcgctggggtctggaggaagagcaggtgctgggctgggccaggaggggaccaagggtgcggtgccttcctttctggtgccaagggccatgggcggctgccagcgtagaaggctcctggggcccctctgagcacaggcttctcctcggtgtggggggctcttcctgcccagggtcgggggctcttcctgcccagggtgagcctgtaagccagcacagccgtgagcacctgagtcgacagcagaggggcagggccccaggtgaggactgtcacaatggggccagggtgaggatgcgcctcggcacaggtggccgtgtgcgggtccagacgacaggctcccccgggcctccagctgaggacaccccacttacccacctccctctgtcagggccaccgtctgactctggattcagggttggccgatgcgttctggatcctttccttgtccttcacctctgcactgcctcatggggacagaccctgtgggaagctcccatcagcacgcaacgccctgtggtggtttcttccattcctttcgttctgggctttctgactatggtggagccggctgtgtttgctgcttgtttttaaccccttcggtaacaagagctccgactacaaaccccagtgctgatggggcccatgccaggggtgggggtgccagagggctgttccctggtgccacgctgccaaccccttggtgctgatggaaggcccagcaggggagagccacctaccctggcagggagcaggtgggcagagggaagatgtggagggtggaagggagggggctctgttctaggaagtccttggagacccctgtggggcaccttgggctccctccgagtggtgcaatgtgagcagtacctggagcccatccaaaggtggtgtccacacccaccagcacctccgccgggcaggctggcagacgcctgagctcaacctcggtcctgggtgtgggcgagtttctgcaggttatggggggcctctgaggggagccaagaaggggttccccccaccaaaagccttgaggggttcaagtggccccaaggacacagctctagaaatcaacagggtgaccccaagtttcctatagaaatgccaaggacttctaagagcagaagcaaggggatcgctgtgtggccagactccaaagacgtggttgtgtagagccacggtcactaagaccacagggcccaggtgaaccaatggacacacggaccgtggaagggggaagatgcagaaacagacctcatgcctatggacagctggccttcgaccaaggagcagagaccattcaatggagaaaggggtatttccagtgccagggcaactggacacgcacctgcaaaaggataaacctcagctcctgcctacttcacaccatacacagaagtcaatttgaggccaggcgtggtggctcatgcttgttatcccagcactttaggaggctgaggggggcggatcagttgaggtcaggagttcaagaccagcctggccaacatggtgaaaccccgtctctactaaaaatacaaaaaaactagctggaagtggtggcgtgcacctgtagtcccaactactcaggaggctgaggcaggagaatcgcttgaacccgggaggcggaggttgcagtgagccgagatcccaccactgccctccagcctgggtgacagagcgagactcagtcaaaaaaaaaagaagtaaatgatgaagtttccagaacttttagaatataagagaatatctgtgtgaactggggtagcccagttcactagccatgaaagagaaattgatgcactgtgctttctcggaatgaaaagcttctgctcattgtagcagaggcaaaacatttttcttgagcctcataatttatttatttatttatttatttttattttttgtgatggagcctcgctctgtcacccaggctggagtgcagtggtgtgatctcggcccactgcagcctccgcctcatgggttcaagcgattatcctgtctcagcctcccgagtaggcgggatgacaggcgcccaccatgtccagctacttttgtatttttagttgagacggggctttgccatgttggctagtctagtcttgaactcctgacctcaggtgatccacctgcctcagcttcccaaagtgctgggattataggcatgagccactgcgcctggccctaaattcttagttggaatagaccctgtgacaaaaaccagattttaacaagagaaacaaacagaagtttatgaacgtgcatatttcacggaagaacctacagaatgagtcgttctccaagaggtgactttgaattccagcttatgtagcatcttcaaccaaggacagtacatttttggagaagtgacaaggcagaggaggactttgagtccccagggctggcagcttgtgggaaggcagagaagggcagatggaggtgagttggggaagcttgcttgtgtagatggtgttaggccgttcttgcttccctctagagagatacctgaggctgggtaatttataaagaagagagatttcattggctcccagttctgcaggctgtacaagcatggcgccagcatctgctcagcttttggggaggccttgggaaacttacgatcacggtggatggcaaagtgggaacaggcacttcccatggtgacagtgggagcaagagagagggggaggtgtcacatgctttacacaagcagatagcacgagacctcacttatcaccaaagcaatggtgccaagccattcatgagggatcaggccccatgatccgatcacctgctaccctgccccacctgccccacctgccccacctccaatgctgggaatcacataaccacctgctaccctgccccatctgccccacctccaacgccaggaatcatataatccctgctaccctgccccacctgccccacctgccccacctccaacgctggaaatcacagaatcacctgctatcctgccccacctccaacgctgggaatcacatttcagtgtgagatttggagaggacaaacatccaaaccatatcatagattcttctagtatcatctttaggccaataagaatccagttgttgtcagtgattaacctttgttcctggcagagaggggaggtgggatatattttgtcatcataaaaaggaaaaagtcacaggatcagattgattgatgcagaaaaagcatttgacaaaattcaatatccattcacaataagaactctcagagaaatagaaataatgggagctttcctcaacttgatagagaacatctacaaaaaacatgcaactaatgcaaaagactggatgctttccccctaagatcagaaatgaagcaaggatgtccactctcatgactgtgattcaacttagtgctggaagttttagccagtgcaataaggcaagaccaggaaatataggcatataggttggaaagcaaggaatcaaactgtccctatttagagaaaacataattgtctttgaaaaaaaaaacccaaagatttaacaaaaaccactcctagaattaaggaaatgagttcagcgaggttgtaggatacaagatgaacatgcaaaaacattagaatttctatatatcaacaataaacatgtagacaccaaaataaaaaccacaaaaccattcacacttgctcaacataaaacacgtacaggactttcatgctgaaactatgagacactgtttttttaaaaaaatcaatgaaggtttcacaaaatagagaggcatacgatgttcatggatcagaaaattcgcatcataaagatgtcaagtttccccaagctgatatataggttaaatataattcctatcagaatcccagcaagatttttttttttttttgacagaatctcactgtgtctccaggctggagtgcagaggcgcgatctcggctcactgcaacctccacctcccaggttcaagcgactctcccacctcagcctcctgagtagctgggactacaggagtgcgctgccacgtccagccaatttttgtatttttagtagagacagggtttcaccatgttggccgggatggtctcgatctcttgaccttgtgatctgcccaccttggcctcccaaagtgctgggattacaggtgtgagccaccacacctggcccagaatcctagcaagatttttttaatagatagaaacaaaattactctaaaatttatatgaaaaaatcaaagaaactagaatagctgaaacaattttgaaaaataagaatgggctgggtgtggtggctcacatctgtaatcccagcactttgggaggccaaggcaggctgatcacctgaggtcaggagttcaagaccggcctgaccaatatggtgaaaccccatctctactaaaaatacaaaaattagctgggtgtggtggtgtgtgcctgtagtcccagctacttgggaggctgagacaggagaatagcttgaacctgagaggcggaggttgcagtcagccaagattgcaccactgcactccagcctgggtgacagagaaagactaaaaaaaaaaaaagaaaaagaagaatgaagtgagaaatcagtttactaggtctcaagatttattatatagctacagtaatcaagactgtgtgatattggtaaacagacacatagaccaatggaacaaagcagagaacccagaaatagatccatacgaatatgcccaactgctttttaattaattaatttgtattataaattcacataacatgaaagttaccattttaaccatttgaaagttgaaaattctgtggcaattagtacatcatgatattgtacaacagtcatcactgtcttagttccagaactttttcatccactcttaggtggaaaccccatactcattaaacagtcactcctaatttccccttctctccagcccctggaaaccaccaatctgttttctgtccctacagatctgcctattctgtgtatgtcatataaatgaaatcatacaatgtgtggctctttcatgtctggcttacttagcatagcattttttttttttttttttttgagacggagtcttgctccgtcacccaggctggagtgcagtggcgcgatctcgctcattgcaagctctgcctcccgggttcatgccattctcctgcctcagcctcccgagtagctgggactacaggtgcccactacctcgcctgcctaatttttgtatttttagttgagacggggtttcactgtgttagccgggatggtctcgatctcctgacctcgtgatccacccgcctcggcctcccaaagtgctgggattacaggcatgagccaccgcgcccggacagcacagcatttttgaggttcatccacattgcagcaggcatcagtactttattcctatttacagctgaatgatattccatcatatggctataccacattctatgtatccattcttctgttgatggacttttgggttgtttctaccctttggctgttgtaaatggtgctgctatgaacattggtgtacaagctttggcttgaatacctgctttcatttctttttggtgtatccccagaagtgaaattgctagatcatatagtaattctatatttaattttttgagggactgccaaactgttttctacagtggctgtaccactttctgtttccatcagcaacttgtggggattccaatttttcttttcttttcttttctttcttttttttaagatggagtctcgctctgttgcccaggctggagtgcagtggcgcgatcttggctcactgcaagctccgcctcccgggttcacgccattctcctgcctcagcctcccgagtagctgggactacaggcacctgccacgacgcccagctaattttttgtatttttagtagagacagggtttcaccgtgttaggatggtctagatctcctgaccttgtgatctgcccgcctcggcctcccaaagtgccgggattacaagcctgagcaaccgcgcccggccggggattccaatttttctacattctcaccaacacgtgttattttctgttctttgataatagccatcctagctggggtaaagtggtatctcatttgattttaattggcatttccctaacgattgatgatgttgaacgtcttttcatgtgcttgttggccatttgcctatcttctttggagaaatgtctattttagtcctttgcccagtttttaattggattgtctaagagttctccatatgttctggatattagaccgttatcagatatgtgatttttcaaatgttcactggggggatttttctctctcctgacagtgtcctttactgtataaacattattttattttatttattttattttattttatattttattttattttattttattttattttattctgagatggagtttcactcttgtttcccaggctggagtgcaacagcgagatgttggctcactgtaacctctgcctcccgggttcaagcgattctcctgcctcagcctcccgagtagctgcgattacaggtgtctaccaccacgtccggctgatttcttgtatttttcgtagagacagggtttcatcatgttggccaggctggtctccaactcctgacctcaggtgatccacctgccttggcctcccaaagtgccgggattacaagtatgagccactgtgcctggcctatagaaacattttaattttgatgaagtccggtttatttatctgatgtttttgccattatatctaagaaaatactaacaaatccatgtcatgaagatttctctcaatgtgttcttctaagagttctgtaggttttgcttttctatgtaggtcttggatccatttgatttactgcccaactaatttttgacaaagatataaaataaatttaatggaagaaagacaacctttcaacaaattggacacccatggagtaggggcaaagagcctccgcctaggtctcacatcttctgtaaatattaacttggaagggatcacaaagatttaaatgtaaacgtaaaattataaaacattcagaaaaaaacgtaggagaaaatcttcaggatctagggctgggcaaagaattcttagacttgactccaaaagcacaagaatagaaatgtaaaaggaaaaattgataaattggacttcttccaaattgaaggccggccttgtaactgaagcatatggtcctgctacacccaacactgggctggtgggttaactggatggaaaaatatgtttatccaagtatggcctgaggtctccaagggccattctgtgccctgctgcagtcagcacctgctgtcatcccctcctcctaattttaggcttcctgctatttgcagtccctggaggatgggctgttgactctgggatcaaaacagaaaagcaggtgagccccatggcgggctgtgcagctccggatgggtgtcctgcccaacgccagagcactgcattctccagggcatttgacttagtgtcccggtgagttcatggcctgctgctgaccgcgcaccgacccccaaagtcactctttgcacctgtaggagctttggtccgttcagcatgaccagactggagagggaggagacaggcagggtgggcagagaaaccggagtgactcagtgactcagaaagtgggacgctcagcgtgagaggtgtatcagtctgtgctgctgtaataaaatccttagagtgggcaattacaaacaatagaaattggctgggcacggtggctcacgcctgtaatcccaacaccctgggaggccgaaggggcagatcacaagagaggctgaggcaggagaatcacttgaacctgggatgcggaggttgtagtgagccgagattgtgccactgcactccagcctgggtgacagagcgagacactgtctcaaaagaaaaaaaaaaatagaaatttgtcacttacagttctggaagctgggaagttcaagatcaaggcgccacatctggtgagggcctgttgcctgtttcctggttcctagatggcaccttctacatgtcctcacatggaggaatggacacaggggctgcctcaggcccccctccttttttttgagacagagtctttctctatcgccccagctggagtacagtggcgtgatctcggctcactgcaacctccacctcccgggtcaagtgattctcctgcctcagcctcccgagtagctgggattacaggtgcgcaccactcctggctaatttttgtatttttactaaagatggggtttctccatgttggccaggctggtcttgaactcctgacctcaggtgatctgcccaccttggcctcccaaagtgctgggcttacaggtgtgagccactgtgcccagccattaggccccttttatacagtcagtaatccgttcctgagggcagagtcctttcgacctaatgacctcccaaaggtcccaccacctactactatcaccttgggagtgaagctataacataagaatgctggggggagaacaacattcagctaatagctggtgggctgcggagggggcagagggcagagctctgttctcccagggcttgtccaccgagagggccccagcccaccagctgggccttttggtaagatcgcaaggcagatggtcaattctgcaaaaaagaagcctgggtgcgtggctcacgcctgtaatcccagcactttgggaggccgaggcgggcggatcatgaggtcaggagatcgagaccatcctggctaacacagtgaaaccctgtctctactaaaatacaaagaaattagcctgctgtggtagcgggcgcctgtagtcccagctactcgggaggctgaggcaggagaatggcgtgaacccgggaggcggagcttgcagtgagccgagatcgcgccactgcacttcagcctgggcgacagagcgagactctgtctcaaaaaaaagaagaaaaaaatctggcaccacttcccctagttcactgagaaaagtgacgccgtctggacacatacccacagtgggacgcagtggagaggccagaccagggaaactgaggcccaaccagtggggcaggtttgaggcaagagtagtaggaggggagggggcagggggtcccccctccaatgcccttggctgagcacgggttcttctgagctcaccggtgctcggagctgcctccctgacttggacaaccatgtggaatggccatcccgccctcaacaagtagaggcaacttcctctctacagtgaggaaattgaggcccagtgaggaagcctgtggccaggagggtgctaggggtcctcacaaagtgtcctgaggggacccacccctcccttgatgccagaccacctggccaggctgcaggagcagggcccagggcctccaggagccaaggcctggccagggctccatgttccccgaggcctttctgactcaggctcctggcctctgggagcctggcccttccagggagccacaggggatggaacctccatctggagcaggggagaaggcatggagtccaggcttgtttgaggggccaaggctgagccccctccagccccttccctgctctgccattaggacctggctcctcccaacttctatacacatcacatgggccgcgtccccccactttgcaggctgagaacatctgacgtgacctgggcacctgaggggcacccggcacagcaggagcatggacctggagaacctctgttcttccgtgcatcaaggtccgagtcgtggttctgccccttagcagctgcgtgactctggccaagctcctcccggcaacaggcctcagtttccatatctgtggatggcactaatcacgatgatgacctgaggagaccgttctgctgatggagtgagcagaatcacaaagctctcagggcctagcccggggcatggcaggtccgcaggcgtccaagggcacagcacagatgtgggagaaagggctgcggggccctcccgctccagccgaggacacggggctcagggatggagcccaatactgtcccagagctctgctgcccaggtgcctcttggggaaactgaggctcagtcccacaaaggcatcagtcccactgaagacagggccgagtccccagcccctcacccccctccaggggtctgtgccacctccagggagccgtggcggctccatgtcacctgcgggcaaggggctggtgtggaaagccccacggcatggtggaaagtccgaaattctacaggggcctctttgttaaacctccatgcaagaggctgggtgacgcctgcccacaggggtcaggccccagcccaatgacacaggtgacccgcaaagactgcaggtcttttttaaaaagtgaagtgcagacttggatctcgctttgcagtttttaattcccctttaaccatctctgggctaaggcatccattgactcacttaaccatctggggagggaaaagccaccgggttgcagggggtgactttggggcaggatggcctctgaaggggtgggttgcccctccacacctgtgggtgtttctcgttaggtagaacgagagacttggaaaagagacacagacaaagtatagagaaagaaattgggggaccaggggaccggcgctcagcatacggaggacccccgctggcctctgagttcccttagtatttattgatcatttttgggtgtttctcggagagggggatgtggcaggatcataggataatagtggagagaaggtcagcaggtaagcacgtgaacaaaggtctctgcatcataaacaaggtaaagaattaagtgctgtgctttagatatgtatacacataaacatctcaatgccttaaggagcagtattgctgcctgcttgtcccacctccagccctaaggcagtttccccctatctcagtagatggaatatacaatcgggttttataccgagacattccattgcccagggacgggcaggagacagatgccttcctcttgtctcaactgcaacgaggcgttccttccacttttactaatcctcctcagcacagaccctttacggtgtcgggctgggggacggtcaggtctttcccttcccaggaggccatatctcaggctatcacatggggagaaaccttggacaatacctggctttcctaggcaggggtccctgcggccttccgcagtgttttgtgtccctgggtacttaagattagggagtggtgatgactcttaacgagcatgctgccttcaagcatttgtttaataaagcacaccctgcacagcccttaatccatttaaccctgagttgacacagcacatgtctcagggagcacagggttgggggtagggttacagattaaaatggagtctcttatgtctactttctatgcagacacattaacaatctgatctctctttcttttccccacagcctcaaaggagaggaaagccaagttgctgggagcaacggttactggtcatcccaaagctgtgtgcgctggttccctggcaccccaggggcttttatgcatgaactgtgcagccagtgggcccaagggttgccattgaacttgatgttagtgagctctcccttcgtgagacccctgcccatggatgagcaaggagaatgggggtgtttcaggagcagacagggatcctgtgcaaagctgggcttctgtgcaactttcgcttgcagttatttaaatatttttgctgtaaatacagaactgcaggggagagggcaggaaacccagcgagcagcagcccggcctggctggggacaggatgtgtctgttggagcggggaccggcaaggcaggcatgcaggcagggggcttccctctcggggtcttcggaaggcgcagtgcagggagtgagagacgcccaggcctgggcagcgagagggccctgctccccgctcaaggctcccaggacattccacacaggagccagcctgttccaaccctgcactgcctgatactccacagccaccactgagatggaccccctccccctcagctccccatgacgtccccagcacctgaccccaggctgaccacctcggccaccacctctggccccaccttcctccccaggtttgttcccaaacacccctagagtcttttccggagcaatctcagacgtgcagaacgctcagggggaccctgggcctgaaggcggtaggagaaaccgagaccgacccctggtctagaggagaggtgtctgccgctctccatcctggactctggctgcccaaaagcaaacggcacgcctgcccacgtgggaatcttggtggcgtctctcactgcatcagttagcccccagcccagtgctgcctggattcaggcttcctggtaccttcgtccacccttcagccctaatccatgctggccaggtcatctcgttctctggctcagtgggaacactcgtgcccagagacctctcgtggttctctgcagcctgcacacagggcctgcttccctggcttgaccgcacagacaaggggactgttaccaaggcctcccactgaggccaccccccctccaggccatgcctgcggggccaccacagcctcagcatcattgcaggccccaggcctctgcacctggtcttgttttactgggggcactgtccccactcacgtccacctgggaccctcggctcctgtccactgcagctcccctcccggacaccttcccagatgcccccggaagctcctgtccaggccacagcatccctcagcctctgtcactggtcctaggaagaccctttgggagctctcactcagggccacactcaggacccccgttgtggggctggccgccttccttctaaagcacctggaggaaggaaggagggggtcaatgcgagcctcaatccccaggcgagtgtgccccttttaaagatgagggaaccgaggctcagagaaggaaaggacttgcctggcgtcacacagctagcctaagatggtgaggtcaggagctccctggcaacacccaggctgccgtaccgtctcctgcatcagactgagcctccatcgggctcctcccacagccccaggcgggcccctgagtaggggctctcagcttgtgtggaggtcccccaggaacaccaccccgatccagcctccatggaggctcttgccggccactgggaggggccggtgcaccctgggcagcccctgccagggccctgagacccgagcctccccgccgagggcacctgtctcggctttgccccattcgagcagggccctcgccgaggcaggacagggccacattcggaagtgagagttctctgagtcccgcacagagcgagtctctgtccccagcccccaaggcagctgccctggtgggtgagtcaggccaggcccggagacttcccgagagcgagggagggacagcagcgcctccatcacagggaagtgtccctgcgggaggccctggccctgattgggcgccggggcggagcggcctttgctctttgcgtggtcgcgggggtataacagcggcgcgcgtggctcgcagaccggggagacgggcgggcgcacagccggcgcggaggccccacagccccgccgggacccgaggccaagcgaggggctgccagtgtcccgggacccaccgcgtccgccccagccccgggtccccgcgcccaccccatggcgacggacgcggcgctacgccggcttctgaggctgcaccgcacggagatcgcggtggccgtggacagcgccttcccactgctgcacgcgctggctgaccacgacgtggtccccgaggacaagtttcaggtgggctccccgcccgccccccgctgcccccaggccctgtgagccagggatagtccccggggaagttccaggaggaccccgcccctccagatccccaagcccctccagccttccccaactccctccccacaaggagccaggggcgtccctgatgacaagttagaagttggtccccttcccccagccgtccccacacctcacccccaagccaagggaatggcctccaggttcccccagccccaccctcaacacccctacaccaccacctgactccaccacaagccgaggagatgggcgtggagctgtccaggtcgccagcgcctctgcctgggagctccaccctctagtcatgatggagatgggcaggccgcagggtgtgggggaccatggcagggaccctcatgccaccccactgcaggagacgcttcatctgaaggaaaaggagggctgcccccaggccttccacgccctcctgtcctggctgctgacccaggactccacagccatcctggacttctggagggtgctgttcaaggactacaacctggagcgctatggccggctgcagcccatcctggacagcttccccaaaggtgggtcctggtggactcagccatgctgggggcctggggcagctgctgtcacctgctcagcccagctggactggaaccggagtggtgtttgaggagcccgtgggtgatgttccaggaccgtcttggatcctaagaggcaaaggggccaggcctcacctgtctggccaaggtgtccagttctggggcccaccctacccctggagaaaaccctgaggttgggaccctgctcctgcccctgagctgcagatgtggacctcagccagccccggaaggggaggaagcccccggccgtccccaaggctttggtaccgccacccagactccccaccaagaggaaggcctcagaagaggctcgagctgccgcgccagcagccctgactccaaggggcaccgccagcccaggtaccctccctgcaggggaagccagccagggtctccagtcttcccgggcttccccgggagcccacgccccctccccacccgggctcccacccactgggtgtggggccagcctgcctggggctgtgggggtctcctctgggtactagacccacacactggaccagcctctcagctccctcctgcctgaaggctgagctccccggagctggtgaagtaggcgggcgggtctcatttcccttttactgatgagaaaccagagcccggcaaagggactacccagcactggaccgccccctccacgccctcccaccgcgggcccctgcccaccggcactcacccccactgagaggggaggccaggctgcccccagctcccccattcaggctctcaactgaaggccaagccccccaagaagccggagagcagcgcagagcagcagcgccttccactcgggaacggtgagcggggcccagtgggagcgcctcccttctccctggccaggggcaaggggtcaggggtcagagcagggcctgccctctgagaccctgtcctaggggctggggacgtgctggcctggtgtgtcattccaagggcctaagctgcaccaccagacccaggaaggggacaccttgggtctaagcatgatcttgccagtcgcccctgcccccactgcaccctggttctgggacccccttctcaggcaccttctctgcccgtccactccctatccttcaggaccagcctagacatagcttcctccagaaaatcatccctggcccccagctgcatgcaggctgaacccttcctgtccccttctccttccttcccagggcactggactccagagaccccctatctccctgagggcagagcctaggaactctgtgtccctcccggcacaatacagggcccatgtcatgggggggtgggtctggtcattggtcatgccttcctatccattgtgccagctctgctgacactgccaccccccagcacacgcacacttgggtgcacacacgaacacacacattctcatgtctctgcacttacctgtgggctgtctgcacatggcagggctgggtcccctccttggcctgccctggctggaaggaaagggctctgcagcccagtgctgcctgcttctggcatagagtatgtgcttgggaacagtcttccccacgggtgaccccaatgggtgttccctttcccagggattcagaccatgtcagcttcagtccagagagctgtggccatgtcctccggggacgtcccgggagcccgaggggccgtggaggggatcctcatccagcaggtgtttgagtcaggtagacgctgtggcggggagatggggctgatggggagacccaggctccaagatggaaggaggaccacgcccctttgcatcctggtggtcccacagcagaccggactgttgctcaggtagccagagtttctgcctgtggttctgctgactttggaggaggagggtgagcactgaagtctccctgtcgggggaccttctgcaaggccagcggtccaggcccacatccccacccgggatgtacagcactccccagtcacctccatccatgtgcatgggccctcctgggccatggggttgcatccttagaaagttctgcctgtgctgctgagaccctccagggtatcggcattcttcaaccaggacagcctgtagcatagcgtccttgccccccataccctggccagcctgcagcatcctcgcccgccattccctggccagccgctgaccccatgcaatcaccagtgccatctgaccagggcacagcagggccgctggtggcagacccaccgtgccatcggggcattccatctcaagtccctgacacggtgtctcctcggtgctggacatgggctgggaacaccaagcacagccagggccctggtcttgcacctctggatggtcccaaggcccactgtgttacttcctaaggctgttggttaaattggcacaaactgggaggcttgaaatgacagaaatgccaacatcgaggtgtctcggggccacactccctctggaggctccagggaagaatccttccttgtgtctcccagctgctggtcattatgggggtacccctgtgctccttgttcctgggctcaggacccaccgctccagcctctgcttctgtggtctcacagctgtctcccacgtgtcctctttataaggacaccagtcattgaacttatggtccagtgtgacctcatcttaactaatcacatctacaaagaccctgatttcaagtaaggtcacactctgaggttctgggtggacgtgaacttcgggggacgctgttgaacaccctggtgtagatccaggacaatccccgggccccagactcgactggggtgggggcgggctggaggaatgcaggctgtgggaactccacctgtctctgctagaccccaccctggggcctacacgactgccaaggcaggtcctgctgggcgggtgagccaggaccagccggcatctcctcccaggcggctccaagaagtgcatccaggttggcggggagttctacactcccagcaagttcgaagactccggcagtgggaagaacaaggcccgcagcagcagtggcccgaagcctctggttcgagccaagggagcccagggcgctgcccccgtaagcacctgaccttccctggggagcctggctcttgatgccccccgccccaggaacagcgttgcctctgggggagtggctctgctgggggctgggggctgctgccgagagacgcctggtgccacagccatgtgcaccctcgctgctgaggctgcccccattgctgacgcccctcttccttgcagggtggaggtgaggctaggctgggccagcagggcagcgttcccgcccctctggccctccccagtgacccccagctccaccaggtaatgccctagaccacaggagaggcccctgtctgcccttgctcccctcgggtgggtcctgctgcctctgcctttacctgggcactcagggatgagcaccggggcctgagcccctacccacagggtacagctctttttctttaatagacagtatttttttcctgataatacgcaatggtaatagtttaaatgagtcagagaaagtgaggtcttctcaggctcttaagagcatggcgtttggtccaggctgtacccgctgctctcagctgggcccgtgggtgggccgggcgcccctgctatagccaggaggtcaaggatccactgggaatgccatgctcatctttcgtccccagcatggtttcttaatggggtagaagcagtgtggggggtgcctgccgtggtgggttacagatcttgaccacttggcaccaggggctctgtggggccctggcacttagcagtgacaggagccagtcctgccctgcaggagcacccgggctggtgggcgtctgggggattgttagaatgagtgaggtcattgccgtgcaggaccagcctagcctggctgtctggggggattctggaggaagtggtacctgggagacccctgaaggcacagcaggcaccatccaggcagggcacaaggacggtgggggctgcaggtggaggattcagcaggcgctgaggtcgggagagacctccctgggcctggccccactgccctgtgaggaagggttcatgtggttggtgtacagttccggggcccctggaacgcagcagcctgcaagaaaccgggttttcttcccaatagggatggccccggggggtgtctgttggagaccagatggatggggaacaggtggtcagggcagaatttcaggccctggcagcatgggagcagggcagagactggggagttcaggtacccagagatgctgctgggggagctgttttgggaaggaggtggctctcaggagggtgctgcaccccagcccagtctgcatgggcgtctcttgcctgtgccagaagaatgaggacgagtgtgccgtgtgtcgggacggcggggagctcatctgctgtgacggctgccctcgggccttccacctggcctgcctgtcccctccgctccgggagatccccaggtgagcctgcacctctgccagcgcaaccaggccaccccggttcacggccgcctccacccactgaccctgaagggaagccaccccaagcctctcccatccaagatggaaaggggttctgagtcaggtcactgggccgtggggccggggcctggggttttcccaccctgccacctgcctcccggtctggccacacctgctgcccagcctggacagctgggcccctgagggcagcaaagcagaacagaggcccagggcgaagatgccaccctgtccaagctcatcccaggctgcagcccacgcccccatgggtagccggcccccacccccaagccccaccccagagtcccactccagacagggctggggagcacagaggccacagagctgtgccccccagggcaggtgggagtttgtccaccaatgcacaggacgccgggcttagtgggggcgggaggcctcctctgcgttcacatcccggtgctccttccccacggcccaccgagccctgcccccattccaaccccacaggacgtggcagtctgtgggaggaagagctctgggtgcagtggggacccacgttcaggcgaggctctgccccagcccctgagtggccgtcatcaggccccctctcagccttgtgcctcatcactagaataaggggcacagtgggggtcattgctcggctcctgaagccgttcctccttgccgtctctttctgcccttgatcacctccccattctgctgggtgccattccccttaacaggtgggtcagtttagggaggcccccggcagggcccagccctgagaggcaggcaaagccaccagggctcgcaggtgttggggattcctggggttcatcagagagcacgccaaggggaccctgatcacgctggccagggccaccccacgaagggtaaatgtccccctgctgggctctcccttcctgtgtctctgcccatctctctgctgtgcctcggttccccctctgtgaaaagacatggtcggagccctggagctccacccgtgggtttggggatctgtcacccgctgtcttgttctgcatgtctctgactggtggacacacgagcagtgggacctggaggtgctccagctgcctgcaggcaacagtccaggaggtgcagccccgggcagaggagccccggccccaggagccacccgtggagaccccggtatggccacgccccctcctagccgggccacccctcctgtccacatggccacgccccctcctaggctgggccaccccctcctgtccgtctgtcccctggagtcctgtgggacaggactgccccagccatagcactatgtcccccatgcccaagcccggtccttgtggtctcctgcagtggagtccccatcatggttcctgtgggcctaaacccagctctcctggctgcgggtccaccccggggggcactatgagcattgataacggccccggaagatgtgttccttgttctgctgctgtgagggtagtaggtctactgtgcacagacccagtgttccctctgacagccctgagggccagggggccccccgtgtgtagacgggggaggagggaggaccacagagccaggaagtgccacagcctttcccactcagtgtggacgccttccaccatgccagccctccgcccccaccatgccaggcctctgcccccaccctgctgccctgggtttcagggtcccagcagtcactgactcctgggtggtgccgggcaggcgcccgctgcccctctgatgctgacccttgggttccagctccccccggggcttaggtcggcgggagaggaggtaagaggtccacctggggaacccctagccggcatggacacgactcttgtctacaagcacctgccggctccgccttctgcagccccgctgccagggctggactcctcggccctgcaccccctactgtgtgtgggtcctgagggtcagcaggtgagcggggagtgggggtcagggtgggctcttcaaggagcccaggacctacggggcggatgaattcacctgaaacaggaggagagggaggccaggcgagaaaggctccgggaggcacagggcctggggctgtggggggagcgtggggggctgcggggggaaggggacgctcctagacctccactccagctcctggccctgggcattactgctccccccacaaggcaggacaatgaagggggggatgtcccagcacacgtgggagccctcccctccctgcctcaattcccttccctgcacccctgtgggcaccgcctttcaggagactcccgcactcagccccaaaggaggccaggcccgccaagcaggagagaggtgcgggcgccaggcttgcaggcagcagcctgagggtgcttgggtcgcccctgcctcctggggatgggactggtcccgctgtcctgcagcctgcgtggcaccgtgaggctcctcacttgcgcctagacccgccgtccagccctgggtggtcccaggggagagcgcacagggctcgggttcgggttcagctacatttcccccggccccccgcgtcaccccgcgctgttgcctcccacagaacctggctcctggtgcgcgttgcggggtgtgcggagatggtacggacgtgctgcggtgtactcactgcgccgctgccttccactggcgctgccacttcccagccggcacctcccggcccgggtgagtgagcgtggtcggcggggaggcctgaacccacacccacaccctacaccccaccccacactccccacccacatcatacagcccacaaccacaccccacccacaccccacactcccacccacaccttgcaccccaccccacacccatgccctgcacccacaccctacactccacagccacactccaccacacccccacccacaccctactccccacctcataccctgcacctcaccacactccacagccacaccccaccccacaccccacactcccacccacaccctacacccaccccacaccctacacccaacccaaacccacccaaacccaccactcccactctccacccacacccacaccccttcctcacaccccacacccccatcccccactcaccacccacgcccacaccccacaccccataccccggaggtggcactcctgctcccccccagggctggcagcccctcatcctctgctgcaggacgggcctgcgctgcagatcctgctcaggagacgtgaccccagcccctgtggagggggtgctggcccccagccccgcccgcctggcccctgggcctgccaaggtcagtgccgcaggggccctccatgcatgccggtgctgggggtggggaaccccttgggttggtgttgggggagcacatctcagggcagaccctgggtgccagcttcgagggcttgcaccagacgcactgaccatgtgctcattatctgtagaaaatatttcccctttaaaccaattctttttggcaacttaaatatagttaaaaaggaagctccccccgagggttggtggctgacgtcacggttggctgtgtggccgcctcacagcatgagcctgagagtcctgccagggctccctggtggggtgaagggagagcgggagcgcccggcctgcaggagcaaacccccaccctgtctgacccctccaggttgtctcacccccagccctccctggggccaggatccaccccactgtgtggccagagccctctcagagaggcaaagtgaccccgggtccagccagtagctcttcctgtcctcctgctccggggtcagagaggacctgggtggcgcggagacccctgactgctggggcggctgggcttgccctggagctgggtgtgggggaggcccgagtcgctgctgcaggagcctccgggggggtggcctcttgccctgaccgtccccagcagaggcctcctgagcacatcctggccaccgaggagcctttagggatcctggggtgatgacacgtcccacctgctccactggcccatgctctttcccagctgtgcctccgccccgtatacaccgtgtgggtgacaggccaccccggcgtggtactccccaggagggtgacagcctaccccagcgtggtactccccgggcaggtgacaggcttccccggcatgcaggctctggcctggcatggcacaagcctcagacccagccctgcccttggggcttttgtggaacagtggcgtggcccacagctgtcactgtccccttccttctagaagcctccctcctcacaccacccatctggagtcaggagcccagccgggcatatacgcagatgcccctccctaaccccaggcagctttcctgcaactgctcccgcagcgggtacctcgtcattaacctcctgggttctgtctctgaacagcagagacctctttcttgtcatcgtgatgtgaaatgtaacgccatgtcagaggaaaagttctggctggccttggcctcccccctcagcctgcccccttcctccagggtggttggacgtggccccagaccccatcctgagcagctctcccaccccctgggagcatccttaggaccggggagcatccaggggctttcccctccagaccgggcagcccctccctcagccatgcagggctgccgggcctcgcagcgccagtgttcacccgagtggaggagctgggatgtggctgtttggggccacaaatggggaattccacagggttcaatgtaatatggtctcctctctgctgggggtgcctgcctggggaccttctcccactctggtcgctcacctatagtgtgggctggccctggtggtgcttgtcgggggcgggggtggcatggaccaggcactttcctctctgggcctcagacttcccctctcagagtgggactccttgctggttccctgagctccctcgttttccccaggaggccacacagtgtggaggctgtctgggggccgtgggcagctggccgtgggcaggaccctggggaggcagccccagccccatcatgcccacgcagccctgtgcccccacccccagtggagctgggtgtaagaattcccatctcagtgtgggggaaacacccccgcggcccctaggccctgcggcctctgtacccccaccagggctgtgggagttgggctgacctcttctctttactgggttccaggatgacactgccagtcacgagcccgctctgcacagggatgacctggagtcccttctgagcgaggtaacgcctcccctggcctcctggtgctcctccactccccctcccctgcctcagccggcacccaggctccccactctgggggaggactgccggcccccactgctcttgagccgtggaaactcaggctgtccctgctccacccaccaggagccccagtgctgctgagcacctggcaccccccacaggagcccccctagcccccttgcaggagccccccccggcccctccccctgcgggagcccagtgctgctgagcgcccccagcccctccccaacaagagcccccacacggcccctcccctgagggcctgcaccctggcaggcagaggctcgagcaccaggctcaagatccactttcccagggagggtggggcgtgggagtggggggggggtcccagaccccgtccctctaagatttgcttgcccctcccaactcaggcctctctacgctaagatgggcaggtagaatctgtggggaaaatgtgacttttaagggctctgtctgtttttgccaagaggataagctccttcagcctccacgggttctcctcagtgtctgatgtggcacccgggggtcccagctgaccatggggcaggggttctgccctgtgcagtggccgtgccccacacaccctgaccgtgcaggtgtctgcagagccccagggcctgagagtgggccagggggcccagcgctgggtaatggagctgcccctctggatggggtccccgggtatagctggagaaatgagcgacgggctcacagcctctcccgggtggcggtcttattctgctggcatcgtggggcccgtggccccatcctgtgggagcatcaggctcctgagcagaataagtagctggccccgacccccccaccctgaaggagccacccgaggaggcagaactgccatgaactgccatggggatgtgccctgggcttataggatgtggtgaagtacacaggacagggtcctcggtctggcctgtgccatggggaccttgggcctcagtttccccacctttgatggaatacggtgaagtgcacaggacagggtcctccccagactggcctgtgccatggggcctcgggcctcagtttccccacctttgacttagagggaaggttggatggtgacttcttgtaacgatggccatgattctgtggctgcggcgggggcgcacctggaggttctcaccgtcactctgtcccgcagcacaccttcgatggcatcctgcagtgggccatccagagcatggcccgtccggcggcccccttcccctcctgaccccagatggccgggacatgcagctctgatgagagagtgctgagaaggacacctccttcctcagtcctggaagccggccggctgggatcaagaaggggacagcgccacctcttgtcagtgctcggctgtaaacagctctgtgtttctggggacaccagccatcatgtgcctggaaattaaaccctgccccacttctctactctggaagtccccgggagcctctccttgcctggtgacctactaaaaatataaaaattagctgggtgtggtggtgggtgcctgtaatcccagctacatgggagcctgaggcatgagaatcacttgaactcgggaggtggaggttgcagtgagctgagattgcgccactgcactccagtctggtcggcaagagtgagactccgtctcaaaaacaaaacaaaacaaaaaaaccacataacataaatttatcatctcgaccacttttcagttcagtggcattcacatctcatgtaaccattgccaccaccatctgcagagctgttccagcttcctgaatggaaactctggccccatgaaacactcactccccattcccctcccaacccctggcaccctccactctactttctgtctctatgacttctccagggacctcatggaagtggaatcacacagtatctgtccttttgtgtctgtcttattttactcagcatggtggccccaaggttcatccatgttgtagcatgtgccgaaatctgcttccttttttaaggctgagtaatattccagcacatggatggactgcattgtgttcatctatgctttcctcagcagacacctgggtgcttccaccttttggctgttgtgagtaatgctgctatgaatatgtgtgtgcaaatatctgtgtgagtctttgagtaaaatcgctggatcacatggtaattatatttttaattttttgaagaactgccatcctgttttccacagcagctacaccatttcacatccccaccaacactgcatgagggttccagcctccccatatccttgaaacaattactattttctgcatttttctttcttttcttttcttctttttttgagacggagtttcgctcttgctgcccaggctgcagtgcaatggcgcagtctccactcactgcaacctctgcctcctggcttcaagtgattctcctgcctcagcctcctgcatagctgggattacaggcgcacaccaccatgcccggctaatttttgtatttttagtagagacggggtttcaccatgttggctgggctggtctcgaactcctgacctcagacctcaggtgatccaccccccccccccccccccaccccacgggcctcccaaagttctgggattatgggcgtgagccactgcgcccagcctgtgtttttcttttatagtagccatcctaatgggtatgaggtggtacctcattgtggctaaaccatgtacgtttaagaatttacacacacacacacacacacacacacacacacgtgatgaagctgtaagaaaagggagagaataatgacccaaaatgtcagcacaaggatgcctcaggggtagacacaggtgtcttcttagcgccttttagcccacgcatatgtgcttgcgcagtctctcggtgtgttttctaacatttcacaattaaataaggagtagttgatattcacagccaccatttccaccgtatatgtagagaaaaatgctcaaatcctagcgatcagcccgctgagctttcacaaaccgaacacaccgtgcggtcacgaggcggctctcccgaacaccggctctgcacccccagggcccggggaaccaagacttccccaagggcccagcaaaagtgagggaggaggggaggaaaggagggagagggagggaggagtgctggctgctttccgccagcgcctcgtttgggtttcgctctgctgaggcctgaaggcgccctgagggcccctggggggcagggaggggcggtggctgcggccgacagcaaggaacctccggagaagcgaagccgggccagacgtgccaccggggcctcggcgctggcgaaggggcgcgtgcggccgcactggggccagccccgccctggtccccggccacatcctcgagaccaccggggtggaggggggggtctcactgctcagggcccgcgtgacattgcacaggtttagaaacgcacagcgggaaggtggccccggcgggccgagggcgcaggatccctgctccgtccagggtccgtcctgcgaggaggcgccgggggcgggcccggggcggggcgggcggaaggcgcgcgcggggcggggcggggacggcgacgcggcgcaggcggcgggagtgcgagctgggcccgtgtttcggccgccgccatggccgcggtggacctggagaagctgcgggcgtcgggcgcgggcaaggccatcggcgtcctgaccagcggcggcgacgcgcaaggtgggcgggggtcccggccgcgtcgcggcgcagggggtggagggcgcctccgccctggcctctccggagcgcccgccgagccccgggacccgggtctcgggccggcccggcctcccgccccggcctcccgccccggcctcctgccccgggtctgtcccccgctcttccccggcgcggtctccggcctacgtgcggccggccacgttctcggcctccgcctgggtcttggcgccgcccgcgccctgccccgggggtgtgtccgactctgggccgcggggcaggacctcccgaggagtccccgaggccacgcgagcggagggcgccggtcccgccacccccagagcctggcccttcctggttctgaagcgacccggggacccggtgcctcccgagggccggcgccaggctgcgggcttccgggacctcctcccggctgggcgggggcggactcactcccggaccgcgcctcctcctcggggccctcgcggccgccttccttgtgggtctagctggggaagagggcggtggggagatgggctgcccggggcattgagcaaagcccagttgtcacccttttcgcaggggtactggggaggcctcaggtggtggggactgggacttggcagagctgggtgggggtccggcctgagggcgtggtgtcctcgcacgctccctcccggaggcctggtcctgcccactgccggcctccagtgtctctggcctgacatgtccagtgtggcacctgtggcacaggacgccacctaccctacccctcaggaggagagaggagaggatttaggagaccagaagtgaggtgctgggttgggaaggggcccagccagcaccccaaggctgtgcagcggggtctggtctgtcttttagagttcagaaaatggttgagaaaatgcggacacacacccccacccagcttcaggcacctgaccctccttttccctatctggaagccaggaagaggcgagaaggaagccggccttgagtgggaccaagccagggaggcaggagtggctcgtgggtgtcactgtctgaaccccggcctgcagagggggctccttcagacctggctgagccaggcctgtggtggctgcccacccgcccttttcacagctgtggcaagagcgggagctgctgcttgttgccggctactggcagtgtcctggagccagtgtggctccacaagtcctgtcctgtgtggctctgggtcacgcctttcctgtgggccaggggtccgtgttgtcgagaggggagggcgttgttcaaggatgtctttttgcacaataacctgtgcaaaggtagctagaagacttgaagcaggccgggtgcggtggctcacacctgtaattccagcactttgggtggcctggtgggttgtgggcccaggtgggagaggaggcccgtggccttggagggtgaactcgggaagctccatcccatgagattagacaagaaaggccccgagtctggagggcagacaggttgctgtggggccagcccgcctgcccaccagggaggcgctttcttggtgaggctggtgaagccccaaagcccacctgtggttccctgaaacacagagggtccccaaccagcttccttgtttgcaaagtgggagcatcagcagtggagggttgggaaagttgagagcctggggtggcacgtgccccccccaccccctgccaccccatgcacagactaaacagagaaggggggctcgctggaggttgctgaagggccagcctggcaggtggttcttgggccagcggggaggggcacccagggtgacaggcggttctggatgctggtggaggatctggagatgggatgcccctcctggccctgtggacaggccggctgggtgggcctcccatctctgtctgagctgggggttccaactgctcagcctggccccagtgcctgatatggagtgggcagcgcttcctggctgcagctgggagggtgcccacagtgcacctgctggccgatcatggcatcccagttgggcctgtgccttcctctgcaaatgtcctcccttcccaagccccgtgcagctgcagcgtctctgtatgtgagctcccatgcgtggacagggaacaggtggttttctgcaagggaggaggactccacacacttccccagttcagggctggggctgattcatggaggatgatctggggcgagtaggatgggaggaactgacattctgggcagaaccagagtcctgtttcatgagttcggaaaagcagtctgcagggctctcccaggccaccactgctgctgccgtgtggctccccatggtgggtgctctgttttccttctcggggccccactgccttcctagaaaggctgaccctggccgaggggaagcctgtggcatagtgtgcccttctctttgccctctatgtcagccgggcagcaggagagtggggactgggaggcactttctgccccaatgctgaagtctgcgtttgttggatgtatggaacagccagcctcaccatcctgccagtgttgcccagtcctgggacttctcgggccttgatttccccttctgtgaaagggggttggggacaagacaggccaccttgcaagttccttccagccagcccacaagtcctgtcctgtgtggctctgggtcacgcctttcctgttggccaggggttggtgctgttgagcaggggagggcgttgttcaaggatatctatttgcacaataacctgtgcaaaggtagctagaagacttgaaacaggccgggcgcggtggctcacgcctgtaattccagcactttgggaggctgaggctggtggatcacctgaggttaggagttcaagaccatcctggctaacatggtgaaacctcgtctctactaaaaatacaaaaaattagctgggcatggtggtgcgcatctgtaatcccagctactcaggaggctgaggcaggagaatcgcttgaaccaggaggtgcaggttgcagtgagccgagatcgagccacggcactctagcctgggcgacagagcgagactctgttgcaaaaaacaaacaagaaaaaaccccaaaaatcagccaggcgtggtggtacatgcctgtagtcccagctactcgggaggcagaggcaggagaatcgcttgaaccggggaggcagaggttgcagtgagccaagatcccgccactgcactccagcctgggtgacagaacgagactctgtctcaaaaaaaaaaaacagacttgaccaaaaaaaaaaaaaaaaaaaaaatggcccggcctgcctatgcctaccttcatctcgccctggcctgggcacttttaattctctgggccctttgtctagtgccccctccctgcccctgcaggacaccgtgccctgcctttccctggctggtgtgtttggacgttggtttcctgttatcgcaggtgaggacttagcttcctggcccgccacgcctccctgacatggcctcctgtttggagccttcaggctcatgcttacatccttagctgatcattaaactttgtgaccatttcatgctcactgctttcttgcctgggagctaatggtgaggaaaggtcactgggaaccagcgcaccaacctcagacattgattttgttccagccttttttcctgggcaggggtggctatcacctgctggtaggcagcggcaggcccactgtcctgcctgccctctgactgcggtgtcggcgactgctgcccgaggtttattttgagaaagaaaagccgattaaagggccattaaaaaggtcttttgaagattacagcttccaatgaggttaacagagaaaatttcctccttcaggccgcagccagtcccgttctaaaatccagaacgtgtccctttccagtcccgttctaaaatccagtcccaacaacaaagtggccatgtgacatggccactttgttctcctcccaagggctcagcacaaagctgggttttggcagcttcattgtctccgggcgtcaaagcaggttttattttgcagagcaccctgaagacatttggaagtgaggggtacccttgctgacccctgatcctggggcccctttgccgttcccaggtcccctgacaagcccaccaggccccctgctgagatggctgtgaccctgggctgacccgcccagtggcacattgactccgcctggagctggggagaccagagaggccctgtggttggacggtggcctgggtgcgctgctcctgccctctccttgccctgcctcagctgctgcctgccagaggtgggcttggacctgtggtgggaccaggtctgcagggagggcgagggagggacggaggcttagcttcggccagctgtggctgagtggatctccctcactgcccccaactccagtgagggtgggggacagggcgctgcactcacagcaccaccttggacgcccagcctcaggcagcaggacttggctctgctgactgtttttggttgtcgggtgcttggggtggctcagctgtctggggggggctcggctgtctgtctcggggggcttggctgtctgcggggggctcggctgtctggggggctcggctgtctttctgggggagcttgtctgtctgtctggggggcttggctttctgggtgtgtgtgggatgcttgctgggttcccgccccagtttcagctgtagcagccgtgctcccatctatgtggggatgtgagggaggcactgttcctttagagacggcgttgcttgctcaagtggagaagctgccagtgtgggcagctccagctccctgcacgctctgtgctctgcccattctaacgtctgtgccccttcttctggatggctgccgggcttggctctggcccccctgttggatcccctggctgctgggtggggagagggccacctactgaacctgagggtgggtctgggtgagtcctggctctgctgccacctgctgggctctggaaggtccctcaccctccctctgggatctcattggattcctgtagtgtggggatggtggcagatactctggctgctacgtgagaacagtgtgccgatccctggggtttctcaaggcgtggcacctcacctcacacctgctccctgctgctgagccccacgccaagctggagagcggatgagaagcatgtgtaaccagggtagaggtcgagagtcctctcgtgggggtctccatgttcaagggagctgccgaggcttgagcaggagcccccagcaggtcagcacctccagcctctgcaagtacaggggggtgggagggcaggggcttttgaggggcacgaggcttggggacagaggacccgcatggcttagggatggatggcatggtatgggtgctgggagggaggcaggaagagcagggctggtcccaggggcaagcacaaactcaggcctgttacacggccccagacctcactcagaaggggaccctggccgctggcgtgggtttcctcctctctgaagattaggtggtcttggctgccccttttgtatgaagtcatggatatcttttgagatgggggctctcgggaagaaggtgtggggtacattagcaccagcgtttcctgagtgccgcctcccccgttaatgtccctctccaggaaactggctttgccaaggcccccgctgggacagactgtttctttcactgcagtcctgggagccgagggcaaggggacaggaaagaggaagtgacctcagagcctggtggcaccagcatcatgtccaggctggggggtgagggtccctgaggccctggggcagggcagtgctgttccctgggtggctgaggccggaggggctctgttctcagtcccccatctcattgcggaggaaggagcccaagccccttccagcaggtgctttcctcagtgcccagaggtgctccccggcttctccatccccacgccgcagcctgaatgtctggggtggggccggtgtgggaggtgccggcctcttttccacctgccccactttttatcctgctctgtggtcaaggcctggccccgtggcctgtgagtgtgggggctccgtggcagaggttggggcggcggggtgtggagttcgggacacccacacatgcctgattgccatgctctgcatgggatgttcccagtttatctctgggcaccatactccaggtgctcggaagctgaagcctagagcctgctgggttcacccgagcctccacccgggggcccagggctggtcctcaagtttcctggcctggtgcctcctgagatggggagggtgaccaggccttccctaccccctgccctctgagatggggagggcgtccgggccttccctgacccttgccctcttgagatgaggagggtgaccagggccttcccccaccacccgccctctgagatggacagggtgtccaggcctcccctaccccctgtcctctgagatggggagggtgtccagggccttgcttctcagcgtgggactgacaggtttgccctgacctccacaggcatgaacgctgctgtccgggctgtgacgcgcatgggcatttatgtgggtgccaaagtcttcctcatctacgaggtaaggccaaggtgggctgtgtgtgtgcagggagtggggacctcctgaggcgcatgccgaggtgtgttctgtgtgggtcacactgggagacggggtggtcctggcctggaggagctgatgggtatgtggtcttggggagtgtgagggggagcttggggccaggccaaaggcatctgcagaaagaagacctactgccttgggactcagcccggctggaggctcagaggctgcagagcacgggcctgggggcagggaaggagctgggtggacaaggagtcgaggccctgcctacagtgatcgctgacgggccaggccccacccaccacacccctgcctggtgtcccccagcctggcccttgtcccgccccgaggcctctgtgagtgggggccagggacctcaccgcctctgcccttgtcctccccagcctcctgcctcaccacccagacccggggggcagccgctggcagcagctctgctgtgtctatgttcattgtgtccccgcaggagcagcggatgccctactgcctcagccccagtccccgtgggagatttggggctcgccctccgtcctgggtatttacacacccacacttgcgctcacacatgtgcacacacaggcgcattcacacacttgggccacaccacgcactcacaggctgcattcttgccttgtcaggtggttttccacattccacaagacaaggtcttttgttattttgttgccactttttatgtaatatgtagctgtttatataaaatgtagcaaccccagctctgcagccccaggcactcagccccacccccctcactgctcactgctcgctgctgaccactcaccgccctgggtctcagttcccccatcttggccccagggaacagcagcctgtccagccctccctctgcaggactgtgtgaatgaatgagtgagtgggcagtctgtgctggcccgtcctctccctgtggccaggctggggccctgccagtattggattaggaagcaggtctcagagccctggggagctgggtgtgggggcctctctaggcaggctgggctgtgtccgtacaaacccctcctgccacctgctcgaccttcagtttcttcttctaagtggcaaaggggagaaattagggttttccggaacccccacacatttgtggttgggaaagactcctgtggcaaaagacagaaaacaggttcatcggtgcagggcgtgtcctggaaaaggggagaagaggcactttgccgtgcctagagtcctggcttctgcagagcccagcagagaccagtgcacatggagaagccgaggggtacagggacgcagcgtgaggccctcggaggtgggggaatgcaggagggtgagtttatgggaaaaagaatgaagtgggtgggcgcgggtcctggggctgtctctgggtcctgagggctgtgaggggcatttacatcctgtccaggcggtaacaggaggagccttagtcttgggatgctgtgtgctgctttcctctcaaagggaggcaaggctgagagcttccctgaatctgctgcctagtgggctttagctcagaaacatccacatctaagaggcagattttgagatgagacattctgatatagcggcccagggaagacttcccctccgtcccatgaaggttcttggaagaatccacttgcgaaaagcggattaatagggcagaggtgctggcattcattgtgaataggcatggagaggtagggcgaagatgctgacctgccctcctcccagggaaaggggcatgggcagcctggatgattctaggggggtaggaattttttttttttttttttttgagacagagtctcattctgttgcccaggctggagcgcagtggcacaatcttggctcgctgcaacctctgcctcccaggttcaagcaattttcctgcctcagcctcctgagtagctgggattacaggcacccaccaccacgcccagctgttttttgtatttttagtagagacggggtttcaccatgttggccagcctggtctcgaactcctggcctctggtgatccacccgcctctgcttcccaaagtgctgggattacaggcgcgagccactgtgcacggccatgaatggtttttaggggattcaatgggcttggacagcatctgttagccctggtgaccacctgcccaagtgtgttggcagacacaggtctttcttcctacgatgacctcagtgcatggaaactcagggaggggactggccgtcactgttcctttctccagcagctatgggctttaggcagattcgggggcttcagggagcagctgcatcctgagcttggaggaggcagagggtcgagaggcagaagggggaggtcagggagacctgcggctgcgtcagttcacatcagactgcattttgggtttctgagcccccagcgctggcttccttcagcagggagaccgatcccttctccttggggctattgttagggcagaaagggagggtggccttggaggtgaaaacccttctcagttctgacacaaaggagggctcagaacaggctactcttatccccccaggcagagcccacagcatagcagggagggccctgagcctgggtccaggcctgcaggggtgagaggagggggcggggctagaggggaaggaggggaaggtgagctgggcctaggaggacagagacggaaacagagtgggtagaggggggcaaacagcttctagaagattccaagggtaggaggaggttgtgtctgtgagactgattccagcagaactgagccactggccttgtggggtctctggggactgctgggctggccatacctgcctgcccctccgcccagtggggcaggggcctggctggcgcctgggctctgtattggatcctgagttttgcagacagacctgtgtttggtggcctcctgctcaggtggggctgtgggtttgggatcattttcctgttttccttgttcctagctcagggctggtacaaccagagggggccaggctggcctggcctgagccggaggaagtagctctgtggtccctcagatcagcccctgagatggggcaggggcacctgtcccccagcccagctggtggggaagggaggctgtcaggctagaagcccgccatggccagagtggggatgttcatgcgccccgcagcgcgcactatcccttgaccccctgcctgcttgaggcacttgccctcctggcccccagggccctgacacctggttggggagaaggcggagggaggagcagaagcccacagctgagctggcatccgccctggccgaggaatggctgctccactgcctcacctcacggcctggagaaggctgctgatgccatggagggaccggggctgcacggaggaggccgcccttctcctctccacacccttagtgaaatgcagtcatgagtgtccctcccctcaaacaacaagaaagggctggccgtgcagtaggaaacgggcacgtggcacggaggctgtgcaggtgccatctgggaaatcccaggtagaaccgcatgagaggcagatccacggtactggatggaaggcccagtgtggccggcgtggcgggacgcggagcctggagcccctgcctggggtgttgccggccctacgagcgatggccactcgggtcccctggacccaggagctccctcgggtgggggcccgcctgtagggaggtgtgtgtgttctcagcttcccgctctggcgggcagatggtagcctgggctgttcacacggccgccacacagcaagagcacgcgccgcacaccccgccggccgcatgcctgggaggactccagtggggacagaaggagccacgcacagcagcctctgtggtgtcatttctaggatgttcagaacaggcagacctaggatgcaccctcaggagctggatggcgggctccgctggggccttcgggacgctgaacttgcctgtgtggatctgggtggggtgagggagctcagacaggcccctgcaccaaagcacttgccacaggagtcacgccccgggacacacggactcaccagctgtgcagagggtgtctggagccccctagggggcacccggaccctgttacccaggccctgggatgatggtggggcctcacagtcagcaccctggtcctgctttctgctggtggggtgaaaatcctgctcccagaccacttgctgccggccgccatggggtcccctatctcatgcctgccccactcttgatttcagggctatgagggcctcgtggagggaggtgagaacatcaagcaggccaactggctgagcgtctccaacatcatccagctggtgaggcctgggaacgcggatgcatgttgcacttggactcgcagacagacacacagagacagacctgcacacacagacacacacacagagacagacacgtgcacaaacacacacatgcagacacacagacatgcacacagacgcacacacacacagatgtgcacacacacagatgcgtgcacacacagacccgtgcacggacacacaggcgcgcacagacacagacacgtgcacagacacacacagacatgcacacatacagacacacagacgtgcacacagacacacagacgcgcacacagacacacacagatgcacacagacatggagacagatacacatggatagacacatgcagacacataaatacacagatacacacgtagacacacagatgcgcacacaggtacacagatacagaaacatacagacatatgtactcagagtcacacacacacgtgccccatcgcacagggactcaggttcaggccgaccctgtcatctgctgccatggaattgttgggtcgcagggtcatggggttgccaggggccaggaggacctggagacgtggccgtgctgggtcctgggggagccctggctgaggctggctatgaggggccacgtgagcgcacctggagctgctgaggcttgagccctggaggccctggccggttccctgagttggtacagggcctgtgtgtgcacgtgtgcacgcacatgtgtgtggcaacctatgcgtgtgtgtactgtgctttccagtctccaaagccttccactctattaccttggggcttcccaagcccaggaccggacggacatcatcctcctctttgtctctccaaggagagaggcccagggaggtagggccacctcaggtttccagagaccccggggcttctgcctctcactctgcagggtctgccagccccttgctgcccagtcctggggtccctctggtgatccccaggggctgtctgccgcctgccatctctcctgaagtttctggtctcctctgtgcagggcggcactatcattggcagcgctcgctgcaaggcctttaccaccagggaggggcgccgggcagcggcctacaacctggtccagcacggcatcaccaacctgtgcgtcatcggcggggatggcagcctcacaggtgccaacatcttccgcagcgagtggggcagcctgctggaggagctggtggcggaaggtgggtctgtgcccggcgcactgtaggccctggggttttgttttgccgctgctgccaggcgtgggaatgggcaggacagagggacgagggatccctgggtgccccgaggcagaggaggggctgtctggccgttggccggggaggagtagtgtctgccagcacgagctcagatgtctcccagagatggaggtcagtgctcaagcctgagggagggcacccaggcagtgcatggggctggtggaggccggtgttgctcaccctacgctgcgtagacaagtcttctctgtgattgatccgagtgagattctggacatgcatggtcacagtctgcagaaatagagttgaagttggggtgacataagacacagagtcccgagattgctgcttggaaagtggcctctcggagccatgtctgttccatgtccctcatgtgggggaccctgatgtgaggccttggccgctctgcaaggcaccccagaggtcccccgtctgcacttggccccagcggatccagccatgctgccacagggttccaggcaggaggaggctgagcctggaactccggggcccctgccgggctgcacgcctgggatgcgggggaaggggtggcaggagaggggtctctggccctgtggtggggccagtggagcctcagccaggtcctcctgctgctcctggcccaggtaagatctcagagactacagcccggacctactcgcacctgaacatcgcgggcctagtgggctccatcgataacgacttctgcggcaccgacatgaccatcggcacggactcggccctccaccgcatcatggaggtcatcgatgccatcaccaccactgcccagaggtgagtgaggctggcgccggcggccagcccagggcccctcctccccgcacggtggtgaggtggtctcagggtgacggccatctgcaagggcagtggactctggtagccccagcatccaggccagccgccctcagcccccagctgggggaacgcacagcgggctccactcccactctgccaggccgcggggggcctttgtgcagccccttctgaggggcagctgcttgccctggggtgtgacgcccccaaaggaagtcctgggctggccaggcctgggcttggcaaatgaccctcagcctgggaggagatcagtcgaaaccagcccaaaggctggaaggatcccaaggtatcttttagctcagagcctgggcatgagaaggggctgtcccctgcctgcctctccatccactgggtcccttgagcaccccgcagggaatcgggctggcagggccgtgtggctggcactgatgcatcctcctgttccatctccacagccaccagaggaccttcgtgctggaagtgatgggccggcactgcgggtgaggaggggcttcctggcccgctgggtggcccgggtgctgctggggaccgcagtgacaggtgtggcatatttattctagggctcagttaatgccatgggtgtgagagagccgggtgggggccgggagagacagagaagctgtggcccagagtcggacctctgggtacagggaagctcccctcaacggctgggtgggggtcctgagcaggcaggcgctcgctcctccaggtacctggcgctggtatctgcactggcctcaggggccgactggctgttcatccccgaggctccacccgaggacggctgggagaacttcatgtgtgagaggctgggtgaggtgggtgccgtccagcctgctgggggccgcaggtgtcctggtgcactgggtagcgcccctggggttttgggaccagccttgaccaactcatctatcactcatgggttcatcagcagctgcaggtgccccttgggggcgggacacgcaaggagtggggggctacggggctgacctcagtgaggcacctgtggtcctgcccccagtgggcaggaggcggagagggtcactcaggctgccgccgccccaggctcagccccgtggtcagtgtggggagcttggtgaggctgcttactggggtgggactgctgagcctggggcggtgggaggtggttggttgtgagggagtggccccagcaaggtccagacggcagggctgtgggggtggcgaggccaggagctgggccagtggggagcagggccttcccctgagggcggtcggggcccgggggtgggttctaggctggaaagatgtgtcggaacgtggctgtagccacagggtggacaggaggtcccggaagcaggagagggtggggaggctgctgggaggccgagaccgcctctgggagggatgggggggtgcctggtggggaggggtgtgtctggagtgggggtgcctggaatgccgccctctggttcccttggggtggagttgggggctctggcctagaacaggctgacactgccctgtggaccctgagacccctcaactgggacaggtcggccccttggtggggtggggctcaatggtggaccagaggcacgggccattcaggctgtccttcgcccacacccgaccatgcagggcaaggccaggggcccccgtggctctagctctgtcctctgtgcgctgaggctgaggcaggaccactggaaccagccctgggggcagagggtgggtttgggactgacacggtatccctgtccccgtgtgaaggtggcagcgtcactcccatctgtgtggacactggttccacctccgcgtggctgtacagtgctgccgagggcagtgggagaggccgtgggtaatgacctggcttctagaaccttccccagtggagcctaggggccgggcggagatggagcccaacaggcgaggctggcccaaggtgcgggtcctatgaggggcttgctctcctagggcagggacttcccgggggttccggctccagtggtgaccttggccttagcttatgtctgtgactcacattgggccctcctggaagtggcctggatgcaaggtcggcccacctggttccttcctgctctgtgtgagcagctcaggccctcactgagagtctgtttccccctgtaacatgcgggttcccgccttgcccaccacccagggtgcactggggcagggagggtggcacagctctcctgctggacctgcagcccatcttccgggtgtctgacctcacctgcactggcgccacctcctccaggtagccctccactcccaccacacccgggccctgtctgagctgctccaaccctgtccctgtaggaggcattgtggcccgtggtgggcaaacatggggcttgtggctcagagcgagtcccacaaatgttggctgggtcattgaagtggacggccgaaaagctctttcagttcccagagagctgggccgcggctggtgtgtggtgctgaggcagcagcctgaggctggcagaggggatggtgtgtcctatgtgcaccagtgtggacccacagtggcttcagggtgcagggtgtccggggagccctggctggtgccagcgatgcggggcccctggttataaggatgagcagatggaagctcacaggggccccaggtacctggcccaggctagcccgggcaggcccctctgccctgtgccccgtggagctgcagccctgtgcgtcttcccgcctggaaggcttcaccagacacaagggcccagccccagctgtgtgtgtgctgggcccagccccgagggcccccttcctcccctgctgcccttcccaggctttcgggcagagccctcttgttcaccgcctccaggagggcggggcgtcctagtgggcccagcctcatctctgccctcgcgctccaggcctgctttcctcctgctgggtggggattgtgccctggcccatgtgggttgggaatggtggccccagggagggctcctggcacccgggggctgtgtccggggcaggtttccctgcctggcagctgagccctgtcgtgtctttgacccagactcggagccgtgggtcccgactgaacatcatcatcatcgctgagggtgccattgaccgcaacgggaagcccatctcgtccagctacgtgaaggacgtgcgtgtgggcctgggggtggccactgggcacctgctcctctaggccgtgtgggctggggctcagggctggtccttcccactgtcctgcagctggtggttcagaggctgggcttcgacacccgtgtaactgtgctgggccacgtgcagcggggagggacgccctctgccttcgaccggatcctggtaagtggccatcaccctgccctgcgtacgtgcgtgggtaagcgtggtgtgtgggtgtgggtgtgggcagtgtgcacgcgagcatggcacgtgcactgtgtccatgtggctgtgggtgagtgtccgtgtctgtgtgtgggggtgtatgtgtgggggacgcgtggtccttgtgggtgtgtctgtgtgtgtctggtccgtgtgggtgtgtgtggcagtgtgtgtgggtgtgtgtcagtgtgggtgtgtgtgggtgttccctcaagctgttgctcctcctgggggagactgaggcctggcttctccgttcccctgcaggtatagggaactcagacctggggaccatgggaggccccccaccagcctgtgcctcctggctgttctgacccccaccctctgccagcccaacgtggcagcagtcagggccaggggcaggccctgggagaggggctgggtgggcagagggtggtgcccatggcgcctgtggcgtcacagtctgggaggctggtgctgggagggagcattcggggtctggcctggcctcgccgtccttggtcctgatcaccgctgggtctcactttgtcctctgcaaaatgggaatgaagttggagccaaatggagtgggtctggggccaggaaggcaccatggtaggcaaaatgcctgtgtatgagggtggtcaccctctcaggcagggccagagactgtcagacaggtgggacttgtgctgagggagaccaggtgactgcgcccagccctgtgactgcacctggccctgtgactcgtgtgctgagccgagcattcccagggaacccacacagctggacgagggccactctatagaggggaggcttcctcagagaggggccccgccgacctagccaggcagctgctgtcccctctgtgaggcctcaggctcactctgaagagcctcttgaggggccggggacatcagggcaagccagccgctgctgagcctggggtgatggaaatgccgctgctgtgaccgggccagccatgcactcccagcctgcaggctgctgggttttccagccagtgtcttggatgcctgatgccgggtgtgaaacaaaggacagttgatcgcccctagccgcggctgtcacccagagcgtcagcattcttgtgctccctgagcccgtattcccactgggtgctgcgaaggggccaggggaccctagcacgtgcagtggtaacctgcacttttccaaggagcctcatcctgcatggggggtgtctccgaggctgctccctaaacagcgtcctggagagactgcccagaataaggtgccgcctgtgcctcacttgcaagatgaaaaaacctgtgtggaacacggagggctgtctgtggccccgggggtccagctgctgggcttctacagggctggccactggtggtcatgggacggccacggcaaccgcaggcctggctttcttgtccactgtggccggttcccggggtggggctggggcctgcctttgcagtgtgtccctggggggcagctcctggatgtgtcctctgcccagccctttggccggtgcggacacacaccagggaagtcacgacatgagggcctccacgggaggatccatcgcagcggatggggccctggggacctggctcccgcccttgccttgcgcgcctagcgatggcagcgagcgacggtgggtgggtcgcattgcatggcaccctgcagccagcagtgcaggctgggccttccagcagggcagcgaggactctgtgaaatggtgtctggtgtgccgtcgtgaatgctggtcagacacgtttccatctctgatgccacctgttctggaagcttccgtcagcgtggggggctctggaagctggggtttgcacatctacagaggatgggcatgtggcttggggtagagggaccaagtgggtgtgccagcctgaacccttccccacagagcagcaagatgggcatggaggcggtgatggcgctgctggaagccacgcctgacacgccggcctgcgtggtcaccctctcggggaaccagtcagtgcggctgcccctcatggagtgcgtgcagatggtaagccctgggccccccccatcagaaccgcctggcccctctccccagtccccactcacaggccccactgctctctgggggccccagcactgtgagcaccggagggcagggcctcgtggctggcccagggcatcccaggtctccagggaggggagggatgtgagcacatccctgggtgggacgtgggacctgggacgttccccaggaggtgtgtcggagctgcagggagcctggtgagcatgggaagtcacaggggtccacggccactgagcttctgtaggcagtggtgggagttggggttacgatgggacggaggaggaggggccagtgatcagagcagagccctgggaggagctcaggcaggtgatggggaacactggggtggctggagcagggaccccaggagaggaggtacggggaaggcagaggcgagggggccgggtgtgggggctggtccagccctggctcggtgggtttggaggcctgcaactggggcagagtgccctgcctggagctggagctgctgagaggtgaggagggcagctgggggcagggtagggcctcctggtctcagccagccccagaagagctggccttggtggtgaccgctgttcctagggagaggctgccaggcctgggccagggtcaggagatgccggccagatctgccctcgtcaggcccaccagacagggcagtagccatgggtgtgcgggccaggctctccatagtctgtgttctgtttctcttccttaagaccaaggaagtgcagaaagccatggatgacaagaggtttgacgaggccacccagctccgtggtgggtaagccccctcagcagacccctgcactcttacatggctgggtcccggtgccaggcagcatgtgctgcagtggcgctatgcacgcctggcctgggtcatccttctaggcaccgcgtctgaagatcgagggaggaaggggcctgcgggtggtacaggaggcgggctgggaggtgtggtaccacaggagaccctgggcggtggcacgggcagggcccagtgcacagggatctgggcatggcgaggggatgagaagctgtggatacaagcccaggacatggggtggccccgcgggggctgggaaggctggcagatgttgggtgtgggtaccacccccctgcaggcgtcctggcggccgggtcaggctggattggacgtctgggttcccatgcgtgcctccacccgctaccaaggtggccaaccctcccttgagctggatgccggccacgtgctttgctgcacgggctggcgtggcctcgtgttgtgttgggggtctcgcaccttctgtggaaggtgccctgcctggcatgcgcggtgtctgctgcctcatggctgagcttccatcgggccgtgtgcctgtgaccagcctcctgggctctgtcacggctgcgctgtggctgtacgccgtggcgctgcagggctgtgcatggtgtgacccgaatcccttccaggagcttcgagaacaactggaacatttacaagctcctcgcccaccagaagccccccaaggagaaggtgaggcagggagcggcgcccacagagggaggaacgggctcagttattctgcagcctcttcacgctggccccgtggctgggcctgcctgcccccaccttccctcctgctggggtccgagctgtgagctgggagggtgggcctgacctctgcctgggctcaggcaccactgtggctggcaggtcccgggtgctgggaccctggctgcagggctggctgttgcttctcagtggtggatggaaatgaagtcaggccacaggcttaactcaggagaggagaagccattgtgtagaaaatgtcccccggggccaggctcacacctgtaatcccagcactttggaaggctgaggtggccagttcacctgaggtcaggagttcgagaccagcctggccaacatggtgaaactccgtctctactaaaaatacaaaaattagctgggcgtggtggtggcacatgcctgtaatcacagctactcaggaggctgaggcaggagaatagcttgaacttgggaggtggagggtgcagtgagccgagatcgtgccattgcactccagcccgggcggcaagagtgaaactctgaaaataaaatgttcccaaacagctgaaaacctcaggaaatgggatctctccaaaataaggatgaaatggcttgtttctaaagtcctgggggacgagggtcctgtagagagagtcacggccagtgaggtcctggctcccaagccccttgagccacagccggagctgcaggccggggcagacagcgtggcccagcctgagtctggtcctcccttccatggacatctttgggtgtccctgctgctccagcctcctgcttatccccagagctagtcagcgggctctaccctccgtggtggggcaacctggtctccacgaacccagaacctggcaggggcgtgactggctttgtgggcagcagggctggctcgtaccaggacccagtggggccatgtggctatggagcccttgggtgtggctgctgccaagtgggatgtgctgcacgtgacaggtgcacgccaggttcagagcctcagcacggtgggtggaggggaggtggtggcggccgtcactggattcacatggatgtggtggggttttgggtccatcaggttaaattaactgtagtcctgatgggactgtctccatgtcttttcccttcccttaacgtggctactagaaaacaggatagccagggccccttccttactcgtggctgtgcaccccccaccctcccgcccgctgccagccccttgtgtgggcactgacctgtgttcccgcccgcaagcctggcttcacaacagtgctcgccccttctgcctcctctgttgcctgcgtgccagggggccaggcttgcaccgtgtctcttttggtcttcaccagaatcttctggaattagaacagataccgtattcccagggcagttgggcggtgtgctgggcagcgtccaggctgctggcagggcctggcccctttttccagaacctgccggcctgctgacctcctgtgcaggttgggggtcccctccccggctgtgcctcacgctcatctccccttctctctgaagtctaacttctccctggccatcctgaatgtgggggccccggcggctggcatgaatgcggccgtgcgctcggcggtgcggaccggcatctcccatggacacacagtatacgtggtgcacgatggcttcgaaggcctagccaagggtcaggtgggtccggccggggcaaacaagtgaggacttgggccttctgtgtgcacacttggggcatttcctgtggaaggccggctgctggaggtggaggctgagacctgggtccgcgtgtcggtgcccacccgggcctgggtactcagctctgcctgcagcgtgatgcccaacactggctggcccccgggcacaggcccacccctggggggaattggccagaggctcaggctggcccctgaagctgcatctcctcctggcaggtgcaagaagtaggctggcacgacgtggccggctggttggggcgtggtggctccatgctggggaccaagaggtgagctgcctgctgcgggtacctgggggcaggagggccagggcgcagtatccaggccctgcaggtgggggcggcaaggggaacccagcccggggccctgggctcggcccctcttcctgctggtggtctgcccagagcaggcttcacgcctcctgcctggggcttcctggcctgagctccgctgtgtagggcaggctgctctggcggccccatgcccatggtgggctctccgtggcaaggaagctggcgagcgtctgtccctgcctggccaggccaggcagcctgcactgtcagcactctggctgaggctatgggcctgtctgatggcttttgtcccagggcctgagacccttctgtgggcatggggtgggcacagtccccctgtgtgactacaggggaagttgctgagtcctgagccactgagtggctgcaagggccagaggaagcatccgctcctgccgctgagtgttgggcgagaaagcctcgggcaggaaggggttcccacggggagcccagcggggtggggggttcactcggttgcctggccggtgcctggtgatgctgagtggtgcccaggcggctcacgctgggcctgtgtgtccctctccgtgtggagccacagcgccacatcccgggcattgcagcgactgctgactggctcggggaacggccaaggcaatgcctttctgtgatcagatgcaatctggacacgcgtccccgggtgctgcgtgttcatgcggatgtgtctttgactgcaggaccctgcccaagggccagctggagtccattgtggagaacatccgcatctatggtattcacgccctgctggtggtcggtgggtttgaggtgagagctgcccacggacgaaaaagccccagggcacaggagacccaaggtgtcctcccgccgagggggcccatcctgaaaacccgtgtgctggctgggccgatgcaggggccgagagggtcggggttttaagtgctgtgtgtgggctcgggagggcacccgtgtgccagctgggctgatgcaggggccgagagggttggggttttaagtgctgtgtgtgggctcgggagggttctttactttctccggaaagcttcacaaggttccgattaaccccagtgctggggaggggcaggggaggaaggggactcggaagctggaggacgagaaagaagggaggcggaggaggcagaggtgtaggtgctggacggcatcgctgaacgtggtgtcctggcactgggcaagctgtcactaaataatgaataaatgacagcccttcccccttgccctccatggagtggatctggggtcagagtgggttggaggagactcctgaccctccttagagtccagtttccctggtaggcatcctgagatgacaccaggctgactgcctggcccagccccaggggattgagcaggtgggtcctggcgtccagcacggggcacatgacaggtcagcagggagcagggctgggcggccgccggcagagcctgtccccggcccaccctggcctcggtgctgcccttgacctgccccgtccctactgctgcaggcctatgaaggggtgctgcagctggtggaggctcgcgggcgctacgaggagctctgcatcgtcatgtgtgtcatcccagccaccatcagcaacaacgtccctggcaccgacttcagcctgggctccgacactgctgtaaatgccgccatggaggtacggggctcctggacaccggcctgccatgcccaggcccttgtggggtggggctgagcctacggaggctgctggaggggatagtgtgtggtgagcacctgggagggctgccagggttggggtttgtggggcacaggcccgggtgaaggggctcagctccctgccatagccacttccaggtccaggggggccctgcgttgttcctcgctactgtgatgagctcagatggggagactgaggcgggaatgtccctgcgccccagtgctgggtagtctaagagcagcgcctggcctctgtccaagggtgccagggacacccctgcccactcacagccagtgtgtgtgcaggctgctgtccactgtgccctggggggtggggtcgcctggttgagaacccctggtcctgtggggcccaggtgggaggtgggcccaagcctggtgctgctggctgtctgggtgcgtcagccccaggctggctttggagacacagggctccctgcagggtagccatgccgacggcctacagggaagggtgggcacgtggaggacccccgacccccccttgtcccccagagctgtgaccgcatcaaacagtctgcctcggggaccaagcgccgtgtgttcatcgtggagaccatggggggttactgtggctacctggccaccgtgactggcattgctgtgggggccgacgccgcctacgtcttcgaggaccctttcaacatccacgacttaaaggtgagcccagcccagcccctgctgcggcagacctgccggcatgccagcctgggccccagacactcaggccggccagcgcagggcagggcccgggcaggtgggacgcgtagcccagtgctcctgctggccccggatcgccggtcagcctggaattccctccccacagtcctccggctcatccgtgtccgcccctcccgcaggtcaacgtggagcacatgacggagaagatgaagacagacattcagaggggcctggtgctgcggtgaggctgccgtgggtccctggccacagctgcgcgtccaactctcggggctggggtggggctgctgaggagcggctgggcaggagaaggcaggaggggtccttggagagggtgggccagggcggctttcctgggagctgccactccctctcccaggcctggcccagcggggactcaggatcggggggagacctgaactcgttcccgccgactcaggccctgctgcccctctcaggaacgagaagtgccatgactactacaccacggagttcctgtacaacctgtactcatcagagggcaagggcgtcttcgactgcaggaccaatgtcctgggccacctgcagcaggtgtggggcaggggtgaggctctgagaggcctgcccctctttcctgccaccatctgtccccggccccaggggtcccagccctcacgggcacccacgggcactcccggcaggccctcgggcacgtgtgcccttccccagtgaggggaccgaggcctgtatctaggtgaggtctcatttcaagaaggggtggggctggggctggagccggggcccgagccagggcattcacatgctgagccgagctccccacccctgccaggcctcccgcggccacttccgccgaacccctcacctagatccccgcatgctccctgccttatggtggccctgcaggaagcccgcgtcctggggttttctgagccagggaggggagtcagggtggctgggcatggggcccgaggtgatggggcccgaggtggggccgctggctgccgatgcagggcccaggagtcacttgacttggccaggggcagccgactgccggcctcgggaggcagcttctggcctggacttggagctggagagagcaggcagggtcctcgatcgggaacagacgggaacggtgcacgggttggaaggaatgggtgttcacaagctgcctgggaggctccccgtggggatcctgtctgcactggcgttggccttggcccaggcagcccaggggagtccagggaaccgggcctcacctgtttccagggtggcgctccaaccccctttgaccggaactatgggaccaagctgggggtgaaggccatgctgtggttgtcggagaagctgcgcgaggtttaccgcaagggtaggtggtgggtgcgacccgaggcctcactttgccctcccctggctccctggggcagggcctcaccatggagggctgccacgtgcctctgtttgcaggacgggtgttcgccaatgccccagactcggcctgcgtgatcggcctgaagaagaaggcggtggccttcagccccgtcactgagctcaagaaagacactgatttcgagtgagttccaccaaagcctcgtggaggcgggtggggctgaggggtggcccagaccttccctgaggcaggtgtgccaggcccagccccactggcaccctgaccccgcaaggcctcctgggcccccatgcccaggtccccgccaggccgtggagagcagggaccatgcccaagtcttctgagcacaacactgggcaatcctttcgggtgggcatgggggcacagcgggtagccaggagtgggcacgcttgagggcggctgaggctgactctgtgctgtgcctccgagggatggggaccccagacctgtcccagctccacggataccgagatgttcagacagaggggcatgcacaggctgcagggtcggggggggtgggggggctggggacgtggctgaagagctgccctgacccctgactccccatcatcctcccatccccgtcctgcacaggcaccgcatgccacgggagcagtggtggctgagcctgcggctcatgctgaagatgctggcacaataccgcatcagtatggccgcctacgtgtcaggggagctggagcacgtgacccgccgcaccctgagcatggacaagggcttctgaggccagccatgcccacgcccctccccagcccccacccatgccagcgcagcgccagggctcagatggggcctgggctgttgtgtctggagcctgcaggcaggtgggggctgcgtccctgctcagcccatcccctgcctctatccctggccacctgccaggcctccctcgggctggtgtcttgagaccagcctgccaggccctccagcaggaggacagagtgccctggggcatccaccttcctgcccaggggacgtggcgctgtcggtgtttggaggctgctgccccctggctttggcgccccatgggccctcagcgtctccccatgctgggctcactacatgggccagcccttgctctacctggccggtaggctgctggcgcctaggttgtgttgagagggggatgcccctggccctgcctcactgtgacctgctcctgcccacgtgcagcacctgtcaccttttctagaaataaaatcaccctgactgtggggtgcatcggtctccggagagcacagcctgcagaactcctcagagagaggggggagcagcaccgagcggccagcccagtgggcagcagccccaggggtggagggccctctggccagtgcctgggccaggtcaaagggacatgtgccctgagaggccacaggtgctctccaggactccctgggggccaccagggtgacctgagcccctcctggtcctcccctgggggcagaagggtacagcctcactcctctgtctccccaacctcagcctgagtgggggtctccaacctgcaggctggtggctggcttgagccagtatccaggagacattgatggtggacacgcaagaggggaaaagaaggcagcgcagagctgcgcccaccaggggctagggctgagtcctgcaggcggctacggggtggtggacgccctgcttgcaggatgcctgttaacctcagcgtcgaagcctgcgctctgcatcatgaacgtgggaggtgcttgcccaagagggctgcttcctgcccgcagtgccaccctggggatgtggttttgggacacaggaggtgtctcaagggagaccctggcttggaggggcctaagggccactttgagggcccctgggcagtctcctggttgagctcaggccagtggggtggcctagggacctggtgaaggggctggggaccctcttgccctcgggcaccttgatattcccaagagcccctcactgtgttggccctagtgccggaggcctccagattgcttaactcgagctggggtggaggggcccacacctagtggccttctagttcattctgagctgggccatcctggggccaggcccaggagtggacagttgtccaaggacagtgctccggggtctgcagctctgtctcaaaggaagagagaaacaggttcataggcccagggaaccacacaggcatgctctgggggcctccgttgtgtcacaccgtctgggatcaggactcagttctgagtagaccccctcggcctgccctgcctgatgaggtgttagaacctgttcagctgccactcagctgctgcacccaggtggtcgcctgtggctgatgcccgggacagtggctgcctccctcctgggcgacgtggtgtggcgagcgcctgcgtcaggcccacttctggctgcgtggagttggcgtttctggcatttcgggcagagtgacgcgacctcctgggcccttggtcctctcctgtgaactgggtgaatgggacagagtgtgatgccagtgctgctcggcttgagaacccatttttggggtgacttggggaggagtggagtgggactgtggggtgccccgggctggacgtgcttctggctgtcctccatggctgggtgcattgggtgaggaggtgccgggaggggaacaggcaggaggcggcaatggtggggacggggtagggggaaccgtggggctgaaggcaggcagctgcccccacaggtcccacccaaggtgtgcatgatgtggggcaggagggcgctggtgtaagccccgcatgtccacggcagcccatgtcgggggaagtggaagggactcaatttaaaacgacctcaaccattccaacaaagcgctttactgagggcacccactccacagtcccaaggaggcagacacaggcctgaactgtccaccctctatgtcccgagtggtgactccactccccactgctcagagatcacaccccttctggagagcttgcatcccttctggagagcttgcacggatgagtgactgtcttcaccctgggcttccccaagtccggcgacagtggctgccccagtgctgcagctggctctggtgacggtggcacggcatggccccgagcttgggagaacagcggcctgcacacacggtcacgcatcaccgctcggcggaggatgggaatatctcatggagatctggatctcaaccccacatgggacaagggcccagggacctggctttcctacacaccagctggaaggctgactccccatctcacgtgaatgcttccttggttttggggggcactaggaaggtccccagggccacgggtcactgcccagattgtggcatcctcataagacttgcgactcttcccagaggaaagaaaacccctctcagatgctccaaggactcccctagtctagctgcttcctgtgccaggcccggaccccagggcgaacaggcctgttcatccacaacctcacagctgagggccctcctgcagttcttcacaggagagagaaaggaaggcgcacctgcccagcccggccaagaaaacaaaactctctcccatgggtgcgggaggctgctgcctgcctgctgagcagctcagggcagatgtcgctatgggtgccagcattctcgaagtctcccttgcccaacagaaatctatccaaggaccaagggctggaatcggcaaagccatccgtgaagacctcctcattctgtggagaaacggcccttgctttcaggaagactgtcacaaccatgccttgggaaacgtcacctccagatcaaccttgggaaaatcttttattagggaggacagcctgcaaaatcctccctttaagagcccaggccagcctagaacctccagaccacagaaggggagtcctggggacaggactggtgtagacaggcatctccaccgccccggttagccagtacctaacacccactcctgccctcggccgatgtggcaaaccggggaggcttttgtgtggggccggggctgcggccatggcagccaccctccagctcccgggggctggggaagacgctggggtccccgtggaggctggagcggcgttcaggtcctgcggtcactcggcgtgctcctgcacctcttccccacgcagggcctgcagccggctgcccacagtctgctgcacggcctccagcccctctgcatccagctcccgcagcagcagcaggatggcagtcaggacgttctgagggcagaggggtgcggactaagcccacccggcacggcgaggctgcttccctccacaagggctggggcctggccagcggtgccccaccacggagcgactggtcccgggggtgtgggccgtccaagtgactgaccggcacactcggagaatctgagcagaggagccccgcctgtggacgcgtgtgtggcacctcttccacgtgactcctgttgccctcagcccagcagggcccgggcccacattccacagaccaggacagcaggagaggctgaggggccaggacggctccgtgcggggcacgtgttacacgtgtgtgcgcattcacagacccgcacacgcagctccccctggggcacagctcttcaaggccctgtgaggctccatgctccctccccacggggccctgtgaggctccatgctccctccccacggtttctgtgcagtgggtgcagtgggcagaggcagccgcggcccctagcggcccgccactcaccctgcccctgtggctgctcgaggcatccctggctgagagggaaggaaactggccccgggaaggcggcttcaggccacgttcatcctgggcgccgctgctgagagggagacaaaggcgtgtgagggtcagggggctcgtggcaccgggggggcctctgcaaaccctgtctgcgggtcgcatccaagcaaaggaggggctcatacaaatcccacctggcacacgggggcaagagaagggaggcaactcctgggaggtcaggggctacagatggcagctcctggagagcccggcacttacttcacctgtggggcgccctcccggcaccctggggctccccagctgtaacaccttccacccagggcttcaggggcagggtggggggcacccgaacacacaaatgccgggggagagctcctgaccatggggtcaggccctgtgccggatggcagatgcctaacagagatcacatcccgatgcccccaccacaggcaccagcagcgggtgtgatctgccaagcaggagagaagtgcccagcttctgtcaaatgcgttcgtgacccgctgccaactgccctgggaggcgccggcgtctcactgcagagtcagccctgtggcccctccacggcccccaggcccaaggccatacgggcactgatggccgtgcccacaaaccattccagtcactgtggccctaggccaccccccccaccaggggctccctgcacctcacgagctctggtgctgtgagccttctctgtgccagggcacggggcctggctcaccccctctcctgctccctggcacatccgctgttgggcaaaacatggacctgccactgaaatcactacctgggcactgagtcactcccagagaatatggatgagaacagacactccccccggataatccctgtccctcacttcccagagacgcagctcacgggaagccccattcactccccgtgggaggaccctgggggacagggatgggctgcggagtccccgctgccctccagcctcacgttgcctcctcctcgctgtccagcgggtcccggccagtctcagcagcggagctgagggagctcagtgtgcagcatagcttggggccgccgtggcctgtgccctctctctctggggccgcagtgatctcctctccctcactcagtgcacgggacagctcctcctccgtcacagctttgggatgaaagacagaagacagcatgagtggcctcacccacgtgcaggccacatgcactgcagctcccgtcctcactgtggcttcaggcacagtctgcttgtgaaatgcatgcacgtgtatccacctccagggacaactcccagagtagcagccggttcctcactgtcccatccccagcctggcacaggctgacacacaacagatggtggagggctgctcaggaatctcaacaccagccttggccagaagcaaatactcctcaaaacctcaactaagacacaatagaaaaaggaacagaccatattgaatttattccatttctctcatatatcaatttccctgaagtttatattattaatatcaataaaattgtctgggagaaaatagtggtgtctgtatacctgacaaggatgagacactagtgtgctgagaatgccaaggatgaacaaacagcatgaaaccacagcctggaaaactgtgtcggtgctggcgctggctagaggaggcacgagtgcctccaataggtggagcgcagcagcaggcactgcggtgctgggacggcccctccccacggcaggggcgcgatggcaccgccaccctaggttcacagtggcccgtggagcctgcccagtccctgtggaccagtgcgatgctgcttgccagatactgacgcccccgctcgccatggcgcatggcgatggtcagagcagggctgctactcacagaagcaaaagaaggaacccttttgctttgctaccaggtcctgcggtcgttgggggatacccaaactgtcagtcccaggagggaccctacgctgcgctgctgcattcgggtggcgggatcaagaggagacacagaagccaggggaacagcctctggaggagacttcacaggacacatctatgtcccgccagaccaggtatttgcagaaaaggagaagagaaaagagggctggggacatccccttccagggattgttttgggagggccggtgactccgctgcggccacctaccctggttgtccagcttctgtaggcgcggcagggtgcgcagcacggtcatgcggtagcggtgggggctggtgccgcagcacgggttctcggccagccacagcacccgcagacgcggcagccccttcaggtagaagagctcagccaggctggggatgcggttcctccgcaggtacagctcactcaggcgctggcaccggctcacaggctccagggtggagatgctgttgacactgcacggagaccagcacagtcagcgagggacgtggccagggcccccagggccacctctcaatccccacccccagtaaaaggcactcatgggacctgtgtccctgccctctcctgagaagcctaaatcggatgtcacaagtcacgtgcagcaggacctgggccgaggagagagctgtaggaaggccaggccctgaactcaaaggcggactggggtggaccccaccagcaacagccccttggcccgacgctccacatcagctcctcagggcgctagagtgcgggaggtgggggatgtggccctccttcacaggtgaggaaaattaaggcctctcaggggacatatcatgttgccccaaagcagggagcggccagaaaaactcatggcaaaaactaggagccagctccacgtgacatgggagtgagcacggaccttccaaacccccacttgagggcggcaacactggggatgggcctcatttccattctacagaacgtggacgcgtcagagaagagaaacagcaggcctggagcggggacctgcaggctttaccctgcagcgtggggtccgtcccctccacaagcgaacacgcggagccgctcccgcaggccctcaaaggcgcggagccagggccccctgcctggagggctgcactcgcgtccggcaggcgcctcagaagggcggtcaccaggcccccatgggcagcctgccgtcctgagcccccctccccatgccatcccttcactcggggtttcccaggtctcatgcagctcctagctatgaggccgccccattttaccaagagcaaaactccggctgtgggactctttccaggatggggtctgcctcaggcacaggcagcagcgtgatgtaccgaccgcgtccgcggcctcgaggcttcctgctccgctccagtgcagtcaggcgtgcaggcaccacgcacctgagctcggtcaacacccctggggtcctgtccctcccgagatgtgacagaaatggccccacacacgagcggcctgatgctcggaggccctgtggcccctgggtgactcagtgagcggcagggatagggctggatccacagccccgccccaagcttcctgccaccgtgggaaccacaagctccacgtttccctgtcaggtaagcctttcggaggcaggcctgaaatcccagcctcactgtgtcgcctgactagtgaaacgagccccgcggcaggcacgcgcaccccccctcaacctctgggcgggcacgcgcaccccccccccccccccgctcaacctctgggcgggcacgcgcacccctgctcaacctctggactcgggctccatctcctcctcatctccctgtggggtgggcacttgtaatacctccatgttacagaaaggaaactgaggcacagagagggccatgcctcgcccaaggttagccagccaatagatgggagggctgagatttgacccatgagcatgcctccaagcccatttcattcattcagcaaggctcgggcaggacaggctggtgcccgcgctggggatgcctgaacaccagatggactggcctcagcccatggcgggcagcaggctgggcacgggcatcaacatggcaatgccaacctcagagggcattacggaggatgggcaggggctggcctaccccgtggctgcctgtgagatcaagaaggtaggtcacagtcagggaccaggggcctgcaatacccactctcagagggcaagccctagagacttctgagctgccagaggggtgggccttccccacagggtttaaacccttgtgagcttttaaatgcggaaacccacagaaggcgcccatccagcgtctggtgggcagtggtgagccatgagcgtctgctccctccgtgggtcccacagtaggcaggagggaattcagggataaagggagctcttctcttccccagagcccccaaatacaccccaactgcctgaaagtccagtaacatttgttcattcaagcttcccttagtctgctgggagggcagtgaccccagaagacgggcacaggtcatggggtgcagagaaactggtaggcagtggtggcactggggggcagaagaggccaggactctgggggtcccagggcagatgtggccaccgtgggggcggccagggcgggccaccgtgaatccttaggagggctccaccaccgactggcccagtgaacacagcaatggcttatcggagcacacaggccaagggtgggcaggcgtacagcagggcaggcaggggacaggagccatcaggaggcccaggtgaggctctgaggaaggagggctgaacatgggggccacagggtaggcccagctctcgctgtcccggcccctccccttctggaagccgccctcagtctgtgttggaggtttccaggttatgtcacagtgctgggtcccactggagggacgtgaggctctgccccggcttccaggccccaggctgagcatgacagcaggagcgaggtacctgagcgtgatcacctccaggctgggcatctcctggcaaatggagatctaggaggaaaagaacatgactagcaagcatggcacagcagggcatcgcggccgcactgccatcagccacagagaactgtcgaagccacggccaacccacttccggggcctgaggggcacggccttactcagccagtgtgcccagggtgaatgcccagggcctgaggggagcggccctgctcagccagtgtgcccagggtgaatgcccagggcctgaggggagcggccctgctcagccagtgtgcccagggtgaatgcccagggcctgaggggagcggccctgctcagccagtgtgcccagggtgaatgcccagggcctgaggggagcggccctgctcagccagtgtgcccaggatgaatgcccacgagtatgccaggttctcctctgacaccaccttgcagcccagacgccccgcagactgaaggagaaatgtgaggctcctccttgcacgcactctgtctttattaaattttacgacagcatcgttgctgtcagatgctgccagcagtggagacagagcattcattactttagatgccctcaaaggacatcaggtaaggggaccccaatgtcccctacgcagggatagaaagcaaggaaaggatggaaatcccttcttgataacaggtctaggccaaaaggaagacaggcttgagactggatctcagatcacattggtactgtcaattcaggggtgaggtgcccggggtggtccacaaagcctcacaacctgcaaagctcccacatatgtgagagcccaccatacgccaggcatggcaccagcagctcacagcctggtcagatgcgtcccatgtataagtgactcgtgtctatggacatggtacgtttgtatattcactgctaaacatgcagtatttcagttacagcacaaaacagattacacccagatgccacgtatccaggcttttttttgtctttaagaaaaggtacagttcaaattaaaaaaacaaaggaaaataaagagataaataattgcgctggacatggtggctcatacctgtaattccaatactttgcgaggctgaggcaggtggatcacctgaactcagggggtttgagaccagcctggccgacacagtgaaactccatctctactaaaaagtacaaaaattagccaggcatggtggtgggtgcctgtagtcccagctactcaaaggctgaggcaggaaaattgcttgaacccgggaggcagaggttgcagtgagccaagatcgtgccactgtactccagcctgggcaacagagagagactccgtgtaaaaaaaaaaaaaaaagaaagaaacaattggtatgcgatccctgtgtaagttggggacattttggactgagaaagacaatgagggagagaagaaaaaaatctttcacagacgcacacactcaagttctcccagcagggcttattctctgcctgcctttggggcagcggcaagggggtacaaggctagatgtgaccaagaagagggggtgtagaccttcaacttccccgtaacaaagtaaaacaagccctcctgggattcctttccaggtgagagcaagttccaaactattgctcccctcctctgcgaccaagtgacaaagggtgtttcatttatagggatgttgacgggaactgcaaaataagcctggcactagagaattgtttttccattagtggttctgcagaatgaaaaccgctaagtgaacaaagtaccaagtgtgggactgaattgataggtgcagttttgtcaacttaaaaattctcttgggaaagaagctacaacatttgggttgaggctatttggagatgatcagtgcaatacttacatctgtgaggcaatacttacatctgtgaggcggctgcccctggggagagaaaagatacatactttaattttgttaaagttgaataaaaaacactgaagacaaaaattccaaaaatcaccgatgactccctacaaaccttaagattctaggattttaatggcatggcaaaaaaggaaggttgcccagataactggcaaaggtgtaaacaattgttttagctgattttcaactaaactgtatgtttgacgttggggtggtactttttagataaggagcagcagggttgctccatttgtaagacacaaaaagatgaactcttcctcatggtccctgagtagcagaaggttcatttctctcactgacagacataaacaagggcgtctttataagaggtcaagttcaaagggtgaacaggcaacttatgaagcaaactttaaaagcctgaaacagggttgttgtttctcccagcttagtgggagtactgaccaccccatgcaaaacaaagaaatgcattattgaaagcaaatgacacgggaattgtagccaaaacaccagatatgccagggcagagagaaaagctttttaattaacagggaagagctcactctgggcagtctgcggacacccctgggaggaagcgtctgctctcgctgacccccacacccgcctgcacggtgaggccagttgacacggcgcggtcactctgctgagtccccagggaaccctggagatcttgcaggcctcaactccaggctccctcttctggaagctcctggtcttccttggctcagtgagactcagcattacctgcctttcagcctgcctgggtcccaccgcacccacgtcccttcctgtcacctgctaggagtaccctgggaacggccgcccccagtactgattaccaacgtgtttcctgactcagtcctggaaagctcagttctctctcctattcgacttggtcccagtgactgctggcaaccccagacaacagacccagcccacagggcacccggggcaaaggcgggccgggaaatgggggggggcccaggcgaccccgacccccggcctcctcccctccctcacccgcggctccttcgccgccctcgcccctgcccctccccccttccactccgcccccgccccgccccgccccggctcctccctccggctccgccctcgtcccgccccggctcctccctccggctccgccctcgtcccgccccggctcctccctccggctccgccctcgtcccgccccggctcctccctccggctccgccctctccccgccccggctccgccctctccccgccccggctccgccctctccccgccccggctcctccctccggctccgccctcgtcccgccccggctcctccctccggctccgccctctccccgccccggctcctccctccggctccgccctcgccccgccccggctcctccccccaccccggggcggccgcggccaggccccgcctcaccagcagttgagcttgcgcacgctgtgcagctccgaggccttggcccgggtcagaaccatcttccgcgtcagcttcatggcggccgcccaggcccgaccggcgggcgcccccggcctcctgatcccgggcgggtgacgactgcgcggcgcgtgtctccaggggcggggcccgcgtcgtcaggggcggatcctgagccgattggcggctcggtgaggagagcggggcgacgcgagcccgctggggccgcttgggcgccgctgacacgttggctctgctcctgctcatgcgcggcctggggcgcccttctctgacgcgattctaacgcgaccccggaagcgcgcagcgagcagagggtgggtgcaggtggcggtccccgagtcggcccagtgagggctgaactgctgctcccaggaaccgagcggggtgggctcggtccgacgcgcatcatggccgagtgcctaggcctgactctgagcgcaggcctagcgtggatggcatgggcgctacacagctccaagttacgcgattcaaactcttggaataaacccagggcagccctggggctgtgttgattccttgtctccctccctcccagcatttacagaaaagacgcatttataggaaagacgcacgggcaggtccagcagagcccttacaagcatttcaaccttttagaaatcagataagaccctctaaacatcgttacatgggccacagttacattaagacaggcgttctgacgttctgaaaccgcctttgcaaaaaattgtatcggtgagagaaggttggccttgaaggagatctggccaacccccatcttgcctttggccttaaaactgcccttaattattcctggataagcaaaggtaactttgggagacatttatagtttaagtgatagcagcccttcctcaaaactaaacagcctttgtaaagctaatgagaccactgaaaccgcctttgcaaaaatcataactgaagaaattatgacaggggaagatctcctcacccaccccatcttcctgctatcctctaagctgcttttgttcattcctgggtgtagaccagactagccttgggaaggaatttagtttatagattaaactgaaacaaaattgataatagccctttcccaaaaaaacccttcttgcctggggaccagtctgcctttgtaggactaacaaattaagctacgagattaaaaattacagtttaggggccatgcaacctctggcggcaagagtctgaacctccccaaattgcttctgggaataacatcactgttgcaaaacttaaggtcagtgcttgaaatattttgtagaccctgcattcagatgcagcagatgacaccacccaaacggataatctggctcaaccatgtgtgtgatcccacccagggacagaagtcagccagaactcattttgaccccctatgatttaatcttcgacctgaccaatcagcactcaccactttctgagcccatacccgccaaattatccttaaaaacacggatccccgaatgcttggggagactgatttgagtgataataaaactctgctctcctgcacagccagctctgtgtgtattactctttctccattgcaattccgttgccttgataaatcggttctgtctaggcagtgggcaaggcgaacccattgggcggttacactaccagcctagaaggatagaggagcatgaattccactaagatgcagatgtaaacattcgtcagccattattctggaggtcacaagataagctacttccccaattactcctgcaggtaacatcactattgtacctttgcaggtttcttgcatgtctcacacggatggatccagctaaatgtcttgccaacagctcctgtggccccacccagaagccatgcagcacaaaaggaccaaaaggacagctagatttcatctcgcacctaaccaatcagcactccccatgccctagccccctgttcaccaaactacctttgaacaacccctaacccatgagccttcaattgtaaccgagcagcttagcagctgtgaatccaaaatatctgagacaggactcaatctgtttagaaagtttattttgtcaaggttaaggacaagcccatgacacagcctcaggaggtcctgatgacatgtgccctgggtggctggggcacagcttgctttcatacatttttagggagacatgagacatcaatcaatatgtgtaagatggaaaaagaagaaaaaatatatgtataagatgtacattaagccgggcgcggtggctcacgcctataatcccagtactttgggaggctgaggcaggtggatggcctgaggtcaggagttcgagaccagcctggccaacatagtgaaaccctgtctctactaaaaatacaaaaaattagctgggcgcggtggtgggtttcactcgtgtccatgtgaagagaccaccaaacaggctttgtgtgagcaatcaagctgtttatttcacctgggtgcaggtgggctgagtctgaaaagagagtcagtgaagggagataagggtggggccgttttataggatttgggtagataaaggaaaattatagtcaaaggggggttgttctctggcgggcagagtgggagtcacaaggtgctcagtaggggagcttttgagccaggatgagccaggagaaggaatttcacaagacaatgttatcagttaaggcaggaacaggccattttcacttcttttatggtggaatgtcatcagttaaggcgagaaccagccatctggatgtgtacgtgcaggtcacaggggacatggtggcttagcttgggctcagaggcctgacagtgggcgcctgtaatcccaactactttggaggctgaggcaggagaatcgcttgaacccgggaggcagaggttgcagtgagccgagactgtgccattgcactccagtctgcgcaacaagagcgagactccgtcttaaaaaaaaaaaaaagatgtacattagttcagtctggaaaggcaggacaccttgaaggccgggtggggttgtgggggtggagggaggcttccagcttccaggtcatcggtggataagagacaaaagattgcattcttttgagtcctttcactgaatacacaatttggtctagcttagtaaatctgcatttttacataaacaataaggcagagaaagcaaacagataggcatgtgtctccggtgagcagggggatgacctcctgtcccacacctgtgaagatcagctatcagtttacattccagggtgaaattcaacagaactgtttgagggtaaagatcttgaggcccacaaggaatttccttgtgggcaaattgtgagggagcttcatagctttttatctttgtagcgatcttatttaggaataaaattggaggcaggtttgcctgatgcattttccagctgacttttcccttgacttagtgattttaaggtcttgagctttatattcctttcacacagctaagcctcaaaccatgttttaaaactttttcccctttcccctttcctcctcctccaccctagtctgaagatgtaactgagacaagctgcttgtgttaccttccatcttgaaatacagcctgggaatgtgaacctccactccgttcccatcctgtgctctcaggccttatgcacatttagtttacctggatgcctgttaagcacacaccatgctcacttatctggtcatctctttgcttggaagcttcaggggtcagctcctgaaagggaccggacacctcattctgtctccaacaagattacttcaaggccagaactcactctcggccttgaagtaattgaggactaaactctgatttttctttttttatcttgcccaaattcctaaagggcatggacagtcatgccctacaaaccataaattctcatcagatgggttttatttaaccttctatatcgtggtgttgacaaaaagagtcaaactctgtaaaatattttaagagatttattctgagccagatatgaatgaccatggcccgtgacgcagccctcaggaaatcctgagaacatgtgtccaaggtggtcggggcacagcttggttttttactttttaggaaggcatgagacagcaatctaatacatttaagaaatacgttggtttgattcagaaaggcgggacaactcaaagtgggggcttccaggctatcggtgaatttaaacattttctggttgacggttgagtttgtctaaagacctgggatccatagaaaggaaatgctcaggttcagataaaagactgtggagaccgctgggcacgggggctcacgcctgtaatcccagcactttgggaggccgaggcgggcggatcgcgaggtcaggagatcgagaccatcctggctaacacggtgaaaccctgtctctactaaaaatacaaaaaacaaacaaaaaaattagctgggcatgggggcgggcgcctgtagtcctagctactcgggaggctgaggcaggagaatggtgtgagcccgggaggcggagcttgcagtgagccgagattgcgccactgcacagaaaaaaagaaaaaaaaagactgtggggaccaaggttcttttgaagtctttaatggctgcccttagagacaatcgatgacgaatgtttcctattcacacctttaaaaggtgctagactctcagttaatctcgtcaggattgggagggcctggaagaaaaagatcaagctatgtgaatagagattccttccagatgcacattttctcccacaaaggacggctttgcaggagcgtctcaaaatatggcaggaaacatgtttcggggtaaaatattttgattttattccttgtcatgttatgccagagtcagattggaaagtaagttatgacatatagggttaaataaaacccgtctgatgagaatttatggtttgtagggcatgactctccatatcccttagataggaatataggcaagaaaaaaaatcagagctggccaggcgtggtgactcacacctgtaatcccagcactttgggaggccaagacgggcagatcacgaggtcaggagattgagaccatcctggctaacatggtgaaaccccgtctctactaaaaatacaaaaaattacctgggcgtggtggtgggcacctgtagtcccagctacttgggaggctgaggcaggagaatggcgtgaacctggagggcggagcttggcagtgagccgagatcgcgccactgcactccagcctgggccacagagcgagaatccacctcaaaaaaaaaaaaaaaaaaaatcagagcttagtcctcaggttggtgtaagatgtgggatgacagaaaagtctcagagcagtgccttctgagctcttctacaccaagcaggcagaatgttcactgctaatgagtctggagctggtccccagcagtggtaggaagcttccaacaggctcaggctgtgggtgcttgcaggggcacagtgtgacggccacgggcctcagagctctggtgggctcacgaaggctccactggacctacgtcacagccttggccccctgcccagccctgggcctcccttcttacagggggtgagttaggcacgctgctccccagtaaatctcagggggctacacacagagcctgcttcccagagacacgcagagtgggggacacaggagcttcctgtcgagtctttgaagcaaggccaccaccgccatcaccaggcacacagggccgacacccgctttgtggtttcagccagtgggtcggggtttctggcttgcagctagggatactgctgaggacaaggtaccatggatcaaccgctgctccctcctgccctgacagctgggagctctgcagggctcagcagggcaggctcacccccaactcatgcaaacgctatcctgatgacacctgctgctgagtcccatgcgccccaggccccgtccttgtctcttctttcctccaccaccttcgccccataggtgacacccccagtccagaccccctccaggccgataccctagtcacctgcattgcataacaaatcacccccagacttagcagctcacaatagacatcgctgtctcccggtttctgaggctcaggcatctggagcagctgagctgcatggctgggctcagcctcctgggagggaaaggggggccgtctctgaggacctggctgaggtctcctagctgccccacaagctgtcggtgggaggcttcgctccctgcaacatggcctctcacaacatggcctcccaaggagtgagggatgaggggggcagggagagggggagaggaggagagggagacaaatggagagtcagcaaacatgttccggagctgaagttttcatgatctcggagtgaccacctctcccctgcccatgttgctggcctcgccacccacctggtacgactcaggggcagaacctggtccaccctggaggctctgggctccacaccacatccctgaggcaaactttggaactcctcgggtggcaggtgcagcacacccctcccagatgcccttgggaactcgaatcttctcccttggtctcaggagccagtgcggtgggtagcctgcctgaccccctgctgaccgaggacctccccaccggctggtgctgcagatggttcagattcctgtggcaggtcagagccaggcctgggagaagggacaggcagcacgtgttgatttacattttttcagtgtcctgagaggtcttcaggcctcgtggtcatttccagctccgttctcgtaattgccattctgggagccattggcgcaagggcacctggcacagagagtttacagtggccacgctggctgcagtctttaccctggcgtggcatccatcgctgtcctttcacattttaagaacagttctgctgtatatttccagaatgcagatgactctgtggactccagagatgaaaagaaacatgtctgttccctcagcctgaagccctgctctagaccaggtgtcggcaaactgcagcccactggctagattgggcccgccatctgtttgcaaataaaggtttttctttctttctttctttctttttgagatggagtctcactctgtcacccaggctggagtgcaagggcctgatcttgggtcactgcaacctccccatcctgggtttaagtgattctcctgcctcaggctcctgagtaggtgggactataggtgtcaggcctctgagcccaagctaaaccatcatatcccctgtgacctgcacgtatacatccagatggtcggaagtaactgaagaatcacaaaagaagtgaaaatggccttaactgatgacattaccttgattcctgccttaactgatgacattaccttgtgaaattccttctcctggctcagaagctcccccactgagcatcttgtgacccccacccctgcccgcaagagaacaaccccctttgactgtaattttccacaacctacccaaatcctataaaacagccccacccctatctccctttgctgactctcttttcggactcagcccacctgcacccaggtgaaataaacagccctgttgctcactcaaagcctgtttgatggtctcttcacacggacacacgtgacaataggcatgcaccaccatgttcggctaattttttgtattttattagagacagggtttcaccattttggccaggctgatttcaaactcctggcctcaactaatctgcccgcctcagcctcccaaagtgctgggattacagacgtgagccaccgtgcccagtccgcaaagtttaattaatattagtgcccagctatactgtatttgttcattcttgcattgctattaaaaaacccctcagattgggtaatttataaggaaagaggcctaactggcttacggtcctgcaggctgtacaggaggcatggtggcttctgcttctggggaggcttcagaagcttccgatcatgatagaaggcaaagcgggcaggtgtctcacatggcaggagtaagagagagagacaggggcaggtgccacacacttaaacgaccagatcttgcaagaacttactcactattacgggaacagcaccaagaggatggtgttcaatcattcatgagaaatgcctccttgatccaataaccttccacactgtggattacaatttttttgagacagagtctcgctctgttgcccaggctggagttcagtggcacgatctcggttcacagcaacctctgtctcctgggttcaagtgattctcctacctcagcctccgagtagctgggattacaggcgcacaccaccacgcctggctaatttttgtatttttagtagagatggggtttcaccattggacaaggctggtcttgaactcctgacctcaagtgatctgcctgcctcggcctcccaaagtgctgggattacaggtgtgagccactgtgcctggcctggggattacaatttgacatgacatttgggtggggcacagagccaatccacgtaacatactgattcatttatgtagttgatcctcgaaccactcaagagttgggggcttcaacaccccttaaagttgaaaatctgtgcataacttttgactcctccaaaacttaactatgagtagctcactattgaccagaaggaaggcttactgatagcatcaacacatattttgtatgttgtattataaactgtattcctacaataaagggaactagagagaagaaaatgttattaagaaaatcataacgaagataaaatatatttacattaagtagaagcaggtcatcataaaggccttgccgtcttcctgtgagtaggagaagggggaggaggagggggtggtctagcatctcaggggtggcagaggcggaagaaaatctgcatagaagtggatccccgcagctgaaacccgtgtcgttcagggtcagccgaatggcccacggctgccttcccactgcaagggcagaggcgaggagctgggacagagaccacgtggccggcaaagcctgccacagcgaccatgcggccctgtgcagagagtttgctgctcctgctctagctgggacctccctccttcctggagtgtcctctgaggagcccgccgcctgtcacctgctcccgcgcctcactcaggaccagagtgtgccagtgcctgcggccctgtcactgcctttttctccagttgtggtttcctcctgctgccagagcagggccctttttacctgggcctcgtgcccacaccgtgagaaacactttgtgccaagtgctttctcctctgaactcgagaggactctccatggagattggtacctgccaatcgggttttatggtcgcgtgtcctctcttttatgggaagaatatcgtgtaattgctactgcagcagcgtccgggcagacagacgtgcagtgtgcggttcttctctagaaaggcaggagccgctcccagggcgatgtgggcccggctgtttcatcagagatggtcagcttggtacctacttcaccttaaatgatgttcccacagaggccccgggatacttggaaacaagcgcccagcccctctcgcagatggctctgcagttacgactgtcttataaaatattaactgccttgcggtatgtttttagttaacgagatggctctctagccagaaagcacccagggcaggggcactggatggggctctgctgacatggagcgggtgaaagggagggcgtcttcacctcctttgtctgttaagggggctctaagacacctctctgggggtgttgctgattgtgataggacccaactcctgcagtgggtgctcgtcgagcacatctagttgcagggtggaccgggcgaggactgtaccgtccagcagggcgcagctgcgggtgtgtggggacactgtgtctagttgcagggtggaccgggcggaggactgtaccgtccagcagggcgcggctgcgggtgtgtggggacaccgtgctggccactctggagggcagcttccggccatgcttgtgcagagcacagtgtcctgaagaggtgacagtgtcctgagtgctgtcctacaccaggggctatgaccgccttcccaccactttgcaggcaccaggatggtgggttagtgagatggtggacatccttgggcgcgccagcaccgctggctggctcatctgcggagggccttccagaggcgtgtgctctgggcagtagtctgggcagcaggcctgcacacccagggaggaaatgagggtggcgggtcaggcagtagtctgggggcaccctccctcctcccagatcagaggccacaggacctcttcacttccctggacatggaggccagcagggcccaggaatggcagccgggtatcgcccgctggtggcaaggaaggggcggacagtgtggctttgtggggtgaaagggcgtctgggtcacttgggaaaggcacattcgccttctcaggcatcagagggcagtccccgtccctccccaagccagagagtgggcagcacacagggtggagttagacatccatggggccccgtggccagcacctgccgcgatggggactgctgggcttgatctttctggctgttcctgtcccctccactgtgacacatccagggagcaggccctgagcctgccccagccttggggtcctgcctctctcactgggaatggtccctggcttggggccacatctggggtgctgggggagggggctgcagaggtcttcgagaagggggtcctgggtctcgttgtggggggggtctcactcaggcccaggtccccctgcgactcctgccctgcctttcccgctcccgttggccattcagggcttaaagataatcgcggcactcgccggtttaaaaggagacacgtgcccccaaccctccgaaggcacacatccgcgcgagggtccggttccaggtctctgggggagggcgggctcgcaggcggggtgtctgggcccagccttccctggcgtgtccttggctctagctgcgggcgcgggacgcggcgcgggagacgctctccgggctgagtgacgcagagcgctgcgggcggctccactgcaccgggcacgcggcgcacgctcgggcgagatgtggatggccccgcggggccagggcggcggtgctgcgcggggacgcgggtgacgccggggcgcgggcggctccgagcaggtaggtgcccgccggggccggggcgagggcgcgagcccgggtgcggggactgaggcggccgtcccgggagcttgtgaaggttgaggcggggtgcaagggcgcggatcggggtgccgagtgcgtgcaggggtgcggggtgcggggaccgaggcggccggccccggtgctgctgcagggcgcggcggaatgcaggggcgcggtggggtgcaggggcgcaggcggggttcggggcgctggtgcagggcgcggtggggtgcaagggcgcaggcggggttcggggcgctggtgcagggcacggcggggtgcaggggcgcgggtggggctcgaggcgctggtgcagggcgcggtggggtgcaggggcgcgaaggggctccgggcactggtgcagggtgcggtggggtgcaggggcgggcggggttcggggcgctggtgcaggggcaccggtggggttcggggcgcggactggagcacccagtgtgcgcagaggcgcggggcgctgactgggagccgggtgcggtctgtctgcgggacgccttgccgctggagcgaccctgtccggctggcgcgaggggacccggggatgagggactcagccgtcctcgtgcccctgcccgtccgccgggacagcaggccccgcttctggggcgcttacttcctccgtccccgcacccgcctctgcctgcccagtctccgaagcgctggctttcacgcggggatttcagaagatgcccgagcaacctccagagagggcagggaggccacacggtgtaccgagggagtgcagggcgcgcctgtcccagtcctgctggtgccagaggcccgccctgcccagacagaaccttccatttccccggggaatctgctgggctgggctgggctggctgggggcgggtgggcacaccaggatcctctcgagtcgcctggtcctgggctcgcgtgccaacgagtcttcttgaattcggcctaggtgatggtggtagtggtcttcccgctgccacccctgccatgcgggacccccggggctgagggaggggctgctcagtggctaaccctgaagggtagggaatgctgccccaacccacactccctggggctccactgccccctttctccgggaatagctctgtgcagggcttgggtttggaaatccacccacatggggccttgccttgctcaggcctgcttcatgcatctgtcttctggaagctcatttcctgagtgctctcaacactcacacctgtgccagttgcttgtggagaattttagctgtgaaccagggtggcccaagctgttctcaggtgacttgtgagaaagggattgagcctgtaattttgggtagaagaaccccagaaagggctggatgggcccttggaaggtcgttgccaggcctgggttttcagggttctgcacccctgggctgaggctgaggcacccgtcctgttgggcactgggtcgagccattggcccccccacagcgggcatcagatgctcacaggggctcctggctgcctcctgcaaagtcgggtggtgctggagcaggtctgacctgcttcccagggcctgcttgcctctgggattagaggaacctgcacaagaccccaggggctgtgctgaggtggacagctgcctgaaagatgagcgtgtgaacagaacatgctggtcttaaggcagagagtcccacaccgtggaccctcccgtctgatgctggggtcttcgtttccagcgtggagccatcctcatcccgtgcagggtggaccgcctgcctggggagccacctgcagtctgggtccccttgcggtgccactgcgatctctctagagcctcctcttcctcctgccactggggacatctctgcccctctgcttccctcggaagctggttgtgaagccgggccagtggctgcggggacagctcatggccctggaaagaccccactggcatgcggcacaacatctgctctgagaactgcaggaaaaggccgggcagggcacccctgccatcctgccagtgaagtttacgggtctcggaatgagtgtggccaaggggcaaaggggaggagggagagggggaggtggggttgcctgagagtgcccgccccaggacagcagcccgtagctcagccccaagagcccggcaccgagcttcgagctgcgtggccccgaagaggggctcagtcacctaatgtgatgaggggacggcagagcaaaggcttgtctgacagtgaccgtcgtgtgtagtggagaggacgtggccagagatctggtttcagggcagggatgaggggggattccagtcagatcttttgcatcccagcaaccctccccttgacacctttggggcagtggcaggggatgaccatggatgacctcatgagaacactgtgggtgtcagggactcagggaggccccgcagggcttgaacatgcttatgtttctcatttgtaaagggagggcagtcatccggtggcttcttgtggcctcggtgatgaaggccacatcagagccagggggaaaggatatgagagaaaaagattcatttgaattattgtctttttcctggagtggagagatgtggtactccccaaaacttcctttctaggctgggcacagtggctcacgcctgtaaaaccagcactttgggaagcggaggctggtggatcgcctgaggtcaggagtttgagaccaacctgaccaacatggtgaaaccctgttgctactacatacaaaaaaaattagcagggtgtggtgattggcgcccataatcccagctactggggaggctaaggcaggagaatcacttgaaccagggagaccgaggttgcagtgagccgagactgcgtcactgaactccagcctgagcgacaaagtgggactccgtctcaaaaaacaagaagaaaaagaaacttcctttgtggacagtgagggctatttaaaaaaattttggaatatgaaagtagtcactggtgtctggaagcaggagctgtgcagaattgtacagttgcgaaaccatgtcgctggcagctggtgctggcggtggagacttccctgtgcggtgctcagtgcagctgcacccgtgggggagggagctctttctctggccctgcagtcacctgaggttgttaccattatgaacggccgctgggacccccgcatgtgcatgtactcccccagagtgtccgggggccccagccaagggacacagctcaggcagctgggaacatgtgcaggctgatgaagagaaccggatgagggcttcacatgaggaagcatgtggccaggtcctctcagaacatcagcctcatcttcctgtctctgatctatttcagcaaccaccccatgtgtctctagaaccccagtgtagcgagctggagagaggactgtcctgagggcagcaggcctggttgcagctggcgtgggggtctcagaatggagccctcagccctgaggaaagctggctcggagcaggaggagggctttgaggggctgcccagaagggtcactgacctggggatggtctccaatctccggcgcagcaacagcagcctcttcaagagctggaggctacagtgccccttcggcaacaatgacaaggtaggctttctgctggtcagcctgcagttggcacgtggccacggaggtcaccgttgggcaggtcatagcttgaggctgtgacgacgggggtgggaaagggtctgctgaccttgggggctcctgcccaaccatacctttgggagaacagaactggggagggtgatgcgtgtctcgtcttctgtgggttgcatgaccatttcccatggttggtctgattgggaaatcaccgggttaactcaaaaatgttgcgctagagtcctggaaatctgttacccgtgcttaccttgttgcataatgatttcacatcctttatccgattgggagggcctgggcctgggctagctttccccaaagccctggatacaaagacacaagtatgttgaaagcacatggcatcttgcagtccccttgccaggcaggcaggagggtggctgccctttttccgatggtgcaagatccaggtccccagatccccagcctccacgttttccaccacaccatgttgttcccaaggaaggtggtggtgctgtagaaactgtaaagtgcgcgcacattcaaaatggtcccaagaggaaatgatttcttagattcattcctccctcctgaatccccaccggagagtcttggcaaggtgcttctaatctttggctcagggtcgcgcaggcttccttccttcaagcaaatagtgtgaaagctcctcaaggagctcagatgtgtctccagggggctgggtgtgctctttcgaatgttggaagatctcagtgtgctgtctttaccttcagcaagaaagcctcagttcgtggattcctgaaaacatcaagaagaaagaatgcgtgtattttgtggaaagttccaaactgtctgatgctgggtaagtgacgtgatttgtgtgtaagacctctgacttcttccttccgatcccacatggagtagctgatcaggccaagacccctcagggcctcagtgaagggtcactggagatacctctgtctccatacgaggcttagagtccacagagcatttccacctaacccttgcaagcctcctgtcggggacagttgaccctcatcctgcctcgcaggtgcagggaccaaagtgcagagtttaggtgacttgttcagggtcataagggcactgtcgcgcggcgaggcccagtggtgtgaacacagatgcatcctctaatcctctcatttccacacctgcccccaccccaagagagagagtcccagggtccaggaactggaagggccttagggagagtccatggccagaagactgcccccctgcacagcttgccaaagccagaggcccgacttgcccccaggccccacagagccccctttgcccctcctccccacagagcccacgactcaggtgtggccaagacccccgcccaggcaacatggccactgtctctgagtggctggatatggccctccggagccgatggtgctccccgcagttggcgcccctttaggcacggacagagtgttgattcatgtttgtgtgccctccccgagcaacacccatttcatgctcttccacaaatgggccacacgcttcctccttttactccattgcctggtgagctcctacttatccctcaaggcctattgcagatgctgcctctgccgtgcagccttccgtgactatacaacctctaccaggaagtgagcttccctcctaccgcaccgtgtgtttctctttgatcccagctgtcgtgctgtaactgtgtggctttgtgttcatctttcttgctagctgctgagcttctggggggctgggacgaaagcagagtgttgtgttaattcccagagagtggccttcagctcatatttactgaatatggggagggagaagcatcctgtgcttgggaaatagaagaagactgtgttgccccagggtacctctagtgtactcggtacatcatcagagtttcacggtcaccaatacaacagctgtccctccgcatccctggggaattgttcccggacacccacggacaccaaaatcccatatctcgtatcagtcccaaaatctcatatcaagtcactgatatgagatggtgtggtatttgcatataaactatgtacatccttcagcatactttaaatcatctctagattacttataatacctgatacaatgtagatgttataaaaatagttatactgcatttaaaaaatttgtatttttgggccgggcgcggtggctcacgcctgtaatcccagcactttgggaggccgaggcaggtgatccacccgcctcggcctcccaaagtgctgggattacaggcgtgagccactgcatctggctatgttatttttaattgttttttttttcctgaatatttttagtctgcgtttggctgaatctgcagatgcaaaactcgcggccatggagggctggatgtagagacagtgatgaagagccccatgtggaaggagcggggtctgtagagcagtggtactccagcctcggagctcacccttgttactggaaaggggtcccgatccagaccccaagggcgggttcttggatctcacacgagaaagtatttggagcgagtccacagagtaaagtgaaagcaagttattaacaatgtaaaggaataaaagaatggcttctccataggcagagcagccctgagggctgctgcttggctattttttttttttttttttgagacggggtctcgctctgtcgcccaggctggagtgcaatggcatgatcttggctcgctgcaaccttcgtctcccaggttcatgcgattcaccatgttggccaggctggtctggaactcctgacctcaggtgatccaccagccttggcctcccaaagtgctgggatttcaggcataagccaccgtgcttggctggttggctatttttatggtagttttggatcatgtgcttaacaagggtggattattcatgagttttatgggaaaggagcggggatttcccagaactgatttcctctttctttcagaccatacagggtatttctgatgttgccatggcatctgccaactgtcatggtgctggtgggagtgtctcttacatgttaatatgttataattagcgtgtaatgggcagcgaggataaccagagcccactttcgtcgccatcttggttttggtgggttttacccagtgtcttgcaccctgttttatcagcagggtctttgtgacctgtgtcttctgctgacctcttgtctcatcctgtgacttagaatgccttaaccgtctgggaaggcagcccagcaggtttcagcctcatttcacccagcgcctattcaagatgggactcactctggtttgaacgccgctgacaccctgacctgctgtgtcctgagaagcctaggtgaggccccgtgggtctggggcctctgccagtcggctctgcgtgcttctcacatggaagtggaaacccttggggcagcagggcccagagaggaaggggtgctgacctggatcagatgtaagcaggacagacttgcttctggaggtccccaaagccatcccccatgctcaggggtttgctaggactcacagctgtgcacacagctaaggtttatcatggtgaaggcctacgtgatgggcttggcaagggagaaagacacaggccgagtctggagaatctgagggcaggctgctgcggctctcctgtgcaggcgccatgcatgctccttcctctagccgagaagcacgtggccacctgcaaagcccattcgaggctcagagcccagggcgtgcatcctgcgctggccacgtgggcccctctgcatggcaaccacccaaatcccagactcccagcaggaaagcagctgttcagcacaaacccattgcaggaacagtccaggcccggcaaagcactcctagcagtcaggggacggagagacgctccaaaagccccgttcccagacaccaccttgaaagcaggcccctctgagaaggcaacctgagatctgctgcaccgagtctgtcccgcacagaagccgctctcatctcaccaaccacggtggtcactgcagcaggatgggaagagggaccaggtgtgttcctggctgttccttcctgaggagtggatggaatgtccctccttcttgtggaaagaccagggcggaacgagtggtgagcatcgtctgccacaaacacagcttttcaagcagatttatttataccacttacatgtttccattaagcatggtagggtcttcctaccccactcgtccagacctggagcccctcgacacccgcccgggtaatcccactgcttagccccacgtcctggtaaccctcctcagctctgcacagactcgtctcatttccgtgtctgctgtggccaccctggtccagacctttgtgctcacattttgccaccatggatctcatgaccttgggcagatgacttctcttccctgggccaccaatcctcatctgtgagcgcagagactggaggggatgcctcagaattcacgcgcacatgcggtgggggtggggaggcagggagccccccttgggtggcaggaaggagcccaggttggagagaatacacctccaagagctctcatttcccgtggggtgccgggggtggtgtcccgtttacgcctatctgggccgagttccgagcgagctctccggcgatgtaatttctggatcagtgtccgcaatgcagtttccagcatcacatcaggcttgcaaacgccatgcaggttcaagttccaatctcatcagaggtgatcgttcaaggacaagagggacaggaggtagcttgtgataggctgttaggaacatacaaggacatttggggcagcattggagcaagacgggagagctcaggtccttgtctagggaactcctttccccacctccgacccaggtctctcatccataaacagtggaggtcacattgtgtccggagttggttccttcccgggggtcttggtctcgctgacttcaagagtgaagccggggaccttcgcggtgagtgtcacagctcttgaagatggcagggacccaaagagtgagcagcagcaagatatattgtgaagagcgaaagaacaaagactcctcagcgtgaaaggggacccgagcagtttgccgctgctggctggaggggtggccagcttttattcccttatttgtccccgcccgtgtcctgctgattggtccattttacagagcgctgattggtccattttacagagcactgcttggtccattttacagtgtgctgattggtccattttacagagcactgcttggtccattttacagtgtgctgattggtccattttacagagcatggcttggtccattttacagtgtgcggattggtccattttacagagcaccaattggtccattttatggtgtgctgattggcgcattttacaatcctcttgtaagacagaaaagttctccaagtccgcacccaacccagaagtctagctggcttcacctctcaacatcaggtgctcgcaagatccctgcaagtctgaagtgccttgagcgtgaccttaggggtttgtacggatttggatttgtagggtgcacatccgggaggaattattttttccattttaatgattgagaaactgagtgtagaaacatccgagatcacacagtcaatacgtggcggggaaacctgtttcctttctcactgctcagtggtctttcccctgtgccatctggttcaggtttcatctggttttagagtttttttgtttgtttttttttaattcccttatttgtccccgcccatgtcctgctgattggtccattttacagagcgctgattggtccattttacagagcactgattggtccatttttttcctgtctcatctgtgtatatatatacacatatatatgtatatatatatatattttttttgagacggagtcttgctctgtcacccaggctggagtgcaatggcctgatcttggctcactgcaacctccacctcccgggctcaagcgattctcctgcctcagcctcctgagtagcggggactacagctgtgcaccatcacacctggctaatttttgtatttttagtagagacagggtttcaccatattagccaggctggtctcgaactcttgatgttgtgacccgcccacctcagcctcccaaagtgctgggattacaggcatgaggcaccatgcccagcctcatctgaacttttctaggttatttgttaccagcaaaaaattggaatctaaaaatatggtggatttccaattaaacaagttacaaagaacacataaatttatctcttcttgccctgaaacaccaatgaattgcagtaaagcaaaaaaagacttcaacccacaaagaaaaaagagggaagttagcagttgaagaaagagattgccgcattcttgccagaggaaggggaggaggcagagtagcaggtcctgaaggctggcgactcgggcagctcctgccgtccccaggcgaggggaggaggtgggagaccttgggcgaggtgctagccccatgtcgtctgcttggagcctccatttgtgtgtgcttttaactttttattttgaaataattacagatgtacagaagttccaaagatactgcagaagggccccacggttccccctgtggctacattctgcataactgtagtacagtacccaagccaggaattaaagctggtagaatgcatgtgtttagttttatgtcttttttttttttttttgagatggagttttgctctgctgcccaggctggagtgcagtggcaccacaccagctcactgcaatctccgcctcctgggttcaagcaattctcctgcctcagcctcctgagtagctgggactacaggtgagcactaccacgcccagctaatgtttatatttttagtagagatggggtttcaccatgttggtcaggctggtctcggactcgggacctcaactgatctgcctgcctcggcctcccaaagtgctgggattacaggtgtgagccaccgctcttggccttatgtcatttttcacatgtgtatttgtgtaactaccaccgtggtcaagatacagcactgtccatctccaccgagctcttcctgtacttcctccgtatggtcagctcaccttctcccccatcatccctgatccctgcaaccaccagtctttcttcatgcctatcattgtgtcatttcaaggatgttacgtcaatggaatcatacgctacatgacccgtgtctttttccctcagcacagcgcacttgatatccatccaagttgctgcttgtgtcaatattattattattattatttttgatatggagtctcattctctggagtgcaatggcacgatctcagcttactgcaacctccgcctcccggcaactgggagtagctgggactacaggcatgcgccaccacgcctggctaatttttgtattttcagtagagacagggcttcaccatgttgtccaggatggctttgaactcctgacctcaaatgatccactcgccttggcctcccacagtgctgggattacaggtgtgagctaccacactcggcgttgtgtcaacattatttaactgctgaatattcctttccctttcgccttgcctgtgtcattacacttcaagtgagattttggtagacgtcaaataattgggtcctatttttttaaatacattctgtcaatctgttttttaattgtcatatttagaaaatttatatttagtgtaattattggtatgttagggcttatgtctgccattttattttttgttttctgtttgttctgtgttttttttttgccttcttgtgggttacttgaacattttttagaattctattttgattattcatactatttttgttttttggagacagagtctcactctgttgcccaggctggagtacagtggcacgatctcggctcattacaccctccacctcgctgggctcaggtgatcctcccacctcagtctcctgaatagctgggactacagacatgcaccaccatgcccggttaatttttgtatttttggtagagacaaggtttggccatgttggccaggctggtctcaagctcctgagctcaagcaatctgcccaccttggcctcccaaagtgttcggattacaggcgtgagccactgcttacaccatactatttttgagtgtatcttcttgtatcactttttcttaaaggggttgctctagatagtatattatataatacagcttatcacaatctgctgatgttgacattttaccagtttgagtgaaatatagaaacattatctccttttacatctctgtccccttcttaatctataatataattgcttgaaatatttcttctacatatattgaaatgagggccgggcatggtggcttaagcctgtaatcccagcactttgggaagctgaggtgggcggatcacgaggtcaggagatggagaccatcctggctaacacggtgaaaccccgtctctactaaaaatacaaaaaaaaaaaaaaaaagccagatgtggtgatggccgcctgtggtcgcagctacttgggaggttgaggtgggagagtggcgtgaacctgggaggcggagcttgcagtgagcaaagatcggcgccactgcactctagcctgggtgacagagcgagattccatttcaagaaaaaaaaaaaagaaagaaagaaaaccatgtcagatagtgttataatttttgcttcagccatcaaacatcagttatgaaattcaaggggttactctttttgttattctttcttcctttcagatatttcaaaattccttttcttgtttcctttctgtttagagaatgtcctttagccattcttttagggtgtgtctgctcgtgacaaattccctagccttccttcaattaagaaggtccaaacttcctgtcttttctgaggtgttttttttgttttttttgaggagtctcccactgtctcccaggctggagtgcagtggcaccatctgggctcactgcaacttccatctcctgggttcaagcgagtctcctgcctcagcgtcccgagtggctggggttacaggctgctgccaccatgcccagctgattttttagattttagtagagacagggtttcaccatgttggccatgttggtctcgaactcctgaccttgtgatccacctgcctcagcttcccaaagggctgggattataggcgtgagccactgcgcctcgccgcttttaaaagtttttatttgtttttagtttttggaagtttaactgttgtgtgtcttggcatgtatctctttggatttatcctgtctggtgttcactcagattgtagcgtgtgtaggtttatgtcttttttgtcaaatatgggaaattttggccatgacttctttacatacattttcaggatcactgtctttttcttttccttctggaactctgagcatgaatgtatgatcttttgttatagtgctgcaggtcccagaggttttgtttacttgtgtattttttctttgttgttgtttgtttgttttctctctgttgttcttattgggcaatttctactgttatatcttcctgctcctgggttctttcctctgtctcctccatcctgctgttaggtccatcctttgagttttttatttcagttactgcatttttcagctctaaagtttgcatttggtatatcttctctttttttactggaaatttatattttttcatttgttttgagcatgttcatgattgcttgttgaagcatttctaatgtggctgctttaaaatcattttcagataattctaacatctgtgtcatcttggcgttggtggctgttagctgtcttttttcatcctggttgagattttcctgtctcttgttaaaactagtgatgtttgattgaaaccttgatagtttagattttatgttaagagactcaagatcttgagttttagctggtcctcttgacatgtctatggtgaaggaaggaggtccccccatcactgccccacaaagggtgaagtctaagcccccctgtagcctccactgatccactgacacttcctggggaggcttcttgttactgctgagggtgagaagagctccagcccaccattaggcctttgctgcctcccccatggctggaagggcaggtgctttgtttttgctgggtgggggaaggttgcggctttccactgggcctcctctgatgccttcacagggagcaggaagggcaccacactccctgggtgactggtgctgtgtctttgcaggaaggtggtgtgtcagtgtggctacacgcatgagcagcacttggaggaggctaccaagccccacaccttccagggcacacagtgggacccaaagaaacatgtccaggagatgccaaccgatgcctttggcgacatcgtcttcacgggcctgagccagaaggtgaaaaaggttggtttccatcactctcgctctgaactgtaggtggagctgcatggccccacagtgacacgcggtggtcggcatttcctggggcaagagcaggaggctggcaaagctccagggtgcatagagcccactgcacagcaagggaagcggcggggaggggctctgcaaggcaagcaagacatgcaccccactctcagagtgcttggccatctgcaaagcagggtggggcacagtgagctttctaggaaggtgcaagctgggagtggtgagtgaattctggctgggtgtccttgggcggcatttgtcagggcctgggagggagtagggaggaaggagagggatgcaggacacagatgcgctcagggtgtgctgggagaatggtaggaagggtgtggggagggagggaaaagctgggggaaggggcccaggatagcagggaggcccatgtggcaagtctggaagcaaacgcgagagtccttgcgaggagtctgggccaggcatggcgggatccaggctgagcctggcctgcaggagagcgctgtgagggtgcagactgctggagggaggcccaggtgcagggttaggttctctcgtgcacaacctcactgaggtccctggaccagccatctctgaccaattctcaggccccatcccaggcctgtggagtcagaggctcagccccttgcatgttgaccagccttctggagggttctgagactcgcgtgttgaccagccttttggagggttctgagactcgcgtgttgaccagccttctggagggttctgagactcgcgtgttgaccagccttctggagggttctgagacttgtgtgttgaccagccttctggaggttctgagacttgcgtgttgaccagccttctggagggttctgagacttgcatgttgaccagccttctggagggttctgagacttgagtgttgaccagccttctggagggttctgagacagtgattgggtgccactgtcctggaggtggggagggtggcactgatctctgtgctggcgtctggagccctgaacttggtacctgtcgagtgtgacctgtccactcaatgcatggtgttgccatgaggtggccaaagaggttgagtggggcaggtcccggagacggggtcatgtggccccaggcttcctggctggcacagcccctgagccaccctgtgtcaccatgacacgtgggtgttctccaggcccctggacccctctgtcgctgtggtcacggggacagtcctgttgttgggtttcagatgagggattgaggtatggggaggccctacctaccctttgtctgatgccaccgtggccgtggcagtggtgggtttgaatccagctgtgtctgagcctggggtctggctgcatccctcccccaaccccccggcttctcccagccccctccctgcagctgccgacaggggccggtggtgtgagggagaaatgcctgtggcctgacagtgagggacgccagggacacagaccctgtactgcagcaggtctgcctcgaagcccgggagcgtccaccatgcaggccacagccctgctcctcccagggagaccagcacctccagatgcctggtggacccggtgggacccacgttctgatggtgacaggcactgtgcttgtgggttaactggaccttctttagtgacaatgccaccacatggttgttttgagggcacctaatggcatttctggatttcacccatcacctttgtgtctctgctaggccaatcccggcggagattgcagaccccgctgggtctcttcagacacagcccgcctagcggaacagggaaagtccgctgtgtacttgggagggtctcctggaggacggggggccagagtgacgacagaacctgggagagccgtgttcagacgggaggcagaggaagctgggcccactgagtccccaggacgggccagggcacaggggccacagagcagaggggatagggcagaggggacaggagaggggacaggagaggggacaggagaggggacaggagaggggacaggagagggggcagtgctgggtgcacaaggacagaagggcagagaccccggtgcaggagctgattagacccgggggaggcagggcccaggcgctacggcgggaattggagtctgtgctggcgcatgtttgggaggcgctcccaaaatcgagaggaagaggaaaaagtgggtgccgtgggggcacgagggctgggggaggtttgctgagggcgatcctggtccccaaaggatggcctgatgctcctggcttgggcctctctgcctccctcttctctcgtgatctgtgccctgcccacatggggaccccttttctgggtctgagccggaaaggtgtgcggtgtctgccgcccgctggggcctctctgcatggcctgtgtgggtcggtgctgtccctgaccactgacacacaggttccctccgccgttttccctttcccgcagtacgtccgagtctcccaggacacgccctccagcgtgatctaccacctcatgacccagcactgggggctggacgtccccaatctcttgatctcggtgaccgggggggccaagaacttcaacatgaagccgcggctgaagagcattttccgcagaggcctggtcaaggtggctcagaccacaggtaactcggaggctggagggacacgaggccccggcgggtggggtgggctgtggaggcagtgctggggcaatcagggccatcaggacccaaaaagtccctgggagccgccgaggctgtgccccagcctgagtcggacccatgcacctctcacctgggcacagctgctccctgacgcccgatgctcccactggcttgcctgtgggctggagatggctcagtgcatggccctgctggtgcccagggccaagcagagatgagaaccttggtggcctgggaaccttggtggcctgagaaccttggtggcctgggaacctcggtggcctgagaaccttggtggcctgggaatcttggtggcctgagaacctcggtggcctgggtgcacggctggggccagcactgcaggccatttgtagggggtcagcgagagttcccagtcatcaagctttccattatcgtgtttttccatcaaaatcagggaaggagcattattatttccatctcttcacttaaggcaactgcctggttggagtcaaatcacctcccaaggttgcaccactggtgagagccaggcagggacccagtcctggtggatggtgtgagatcccaggtgccgtgacctggtgccccgccccaccctaattccatggggagggggccccaagtcctcaaggctccctgggcctccctggaggggactgtggatgaatagtgaggccctgaggtgactacttggcaatgttgcgtccggatgggcctagagtcaccctgctcttcctggggtctggggtctggtctttgcctcgcagtggagtcgtaactgagcctgacttggcctgcatggctcacagagtcctcagtttcattgtctgcctggtgagcgtgaggcacggctgcatcttttgacctgtgagtcccacagccctgcttgtaaaatgaccagaccttttctcagcctggtcacatgggactgggtttaacgcaggtcaccatcccacaggctctttctgaagctttgctgcctcaaataatgccatggatttgttcaggtctcacctgctccaggtcttgatgttgcatttttttagctttcaatatccgtgtccttgttgtccgcttcctggcccaaagccagtaccaccttttcaattgttatctttctatctatctatctccatccttccatccatccatctatttatttttgagacagggtctcagtctgttccccaggctggagtgcagtagcacgatctcagctcattgcagcctcgacctcttgggctcaggtgatactcctgcctccgcctcctgagttgctgggactagaggcgtatgccaccatgccaggctaatttttgtagagacaaggtctatgttgtccaggctggtcttgaactcctgggctcaagtaatcttcctgccttggcctcccaaagtgctgggataacaggcgtgagccaccatgcctggctgattggctgttttttttatttttttgttttttttttggagttggagtcttgctctgtcacccaggctggagtgcagtggtggtggcgctatctcagctcactgcaacctctgcctcctgagttcaagcaattctcctgcctcagcctcctgagtagctgggactgcaggcgtgtgctaccatgcctggctaatttttgtatttttagtagagacggggtttcaccatgttggccaggctggtctcgaactcctgacctcaggtgatctgcccgcctcggcctcccaaagtgctgggattacaggcgtgagccaccgtgcccggccggaggtgtgtttcttacaggggtggctgcaaaccaccagcagcagatggcaggtgggaggtgaggggcatccttcctagggaccaggctgagtgttgggagcgaggaagcactctgccgcacctgggtcctgaaagctgggaggaagagggaaagcaaaatacaagaatgcagagaggtgctgagaaccgcgatcctgagactggggcctgaggaggcggcagggaccgggagaggggcggggcctgctcctgttcccaccccacctgagcgcgtgggaacctcggttccttacacctgatgctggtttgaaagcccctgagtgaggagctctgcgttgttgggggcggggcatcgctgagcctagaagggctcaggcgtcaggctcctgggtgtcaggtgcccctcagtgctgtggggcctgcccacccgtgctccttccccaggggcctggatcatcacaggggggtcccacaccggcgtcatgaagcaggtaggcgaggcggtgcgggacttcagcctgagcagcagctacaaggaaggcgagctcatcaccatcggagtcgccacctggggcactgtccaccgccgcgagggcctgatccatcccacggtgagtgcggccccctagggaggggagcctaagaccaggggtgtgggtgaggtctgactgggcgctgtggggagcaggtggagtgtacgggggccggggtgtgggtgacgtctgaccgggcgctgtggggagcaggcggagtgtgcgggggccggggtgtgggtgacgtctgaccgggtgctgcggggagcaggtggagtgtgcgggggccggggtgtgggtgagttctgaccgggtgctgcggggagcaggtggagtgtgcgggggaggcggggtgtgggtgacgtctgaccgggtgctgcggggagcaggtggagtgtgcgggggaggcggggtgtgggtgacgtctgaccgggtgctgcggcgagcaggtggagtgtgcgggggccggggtgtgggtgagttctgaccgggtgctgcggggagcaggtggagtgtgcgggggaggcggggtgtgggtgacgtctgaccgggtgctgcggggagcaggtggagtgtgcgggggaggcggggtgtgggtgacgtctgaccgggtgctgcggggagcaggtggagtgtgcgggggccggggtgtgggtgagttctgaccgggtgctgcggggagcaggtggagtgtgcgggggaggcggggtgtgggtgacgtctgaccgggtgctgtgaggagcaggtggagtgtgcgggggaggcgggcacactcaggagattgggtgcaactcccggcccacccctgacccaggtgaccccggacaaacggctaacttggctggactctggtatctccctcaaggttgtaagaggggtccacgtgacagtcactcgctgcgagggttccgctaacagagcagagggagggggcgtggccagcaggcagctgggtggggctgagccagggcgatccgaccccgaaccggagcttttagcactttgagtccctgtactcagaggtctcctgcagccgggaatcccactgtgctgtggtccctggcagccagcacccacccccagcttctccgtcaaggttgaggacggagcactcctgcctctgattaactggacgcaggagaagcagttgctttaatccggagccttgagttgggacagataatgagtcattcaaccagattttccaaggacacactaactttggtatgatgcgtgtgtgcccctgaatccacgtggtcaggaaagcccagggaacactggcctgtgactcactgagcaggttcccttgttaccccgaggggtgatttactcctctgacagtgacacggacactgtgcgtccattccccgggcgggcagaggacactcccagatgcccacgaggggcccagcaagcactggccagccccagcccggccttcgccttcctttgcgtcagaatcatgaatgtgtccggcggggtcggactggaccagctgttgggctttgtttgctctttttacgaattgaaaaactgaagccaggagcggctgggtgacgtcccaggtcactccttactttcctccccacgctgagttcagacgacttcccgtgacaccactgttggtggcggaatgggactgtggctgcttccgctcagccacgctccctctctgtggacggcggagggtgtgtgtcccagcccggctgccgccctcccttaggtctgtctcccggggctgctgtaacccaggctcacaaacctggtggcttaaagcagcagaaacttagtctatcagatctggaatccgcgtcgattggccatcatccagccatcggtgttggcggggccacctccctctagggcctaggggaagagcattccttgctgcctccagcgtctgggtgctgatggcattccctggccagtggccacctccctccagtcgctgcctccgtgtcccatggccgcctccctccagtctctgcctccgtgtcccgtggccgcctccctccagtgtctgcctccgtgtcccgtggccgcctccctccagtgtctgcctccgtgtcccgtggccgcctccctccagtctctgcctccgtgtcccgtggccgcctccctccagtctctgcctccgtgtcccgtggccgcctccctccagtctctgcctccgtgtcccgtggccgcctccctccagtctctgcctccgtgtcccgtggccgcctccctccagtctctgcctccgtgtcccgtggccgcctccctccagtctctgcctccgtgtcccgtggccttctctgtgtgcctgtgtcaaatctcccccaagagttccgtaagaacactcgtgatggcgtgtaggtcccactagggtcatctagggtgatgccttcatatccagatctttaactgacatctgcaaagatgcttttccaaacaaggaaatgaggagcagcacttaccgggtccatgagcaggccttgatgtctttgggtggccatgattcagccaactgcggtcctccctctgacctcaaagatttctgtccactccacaggcaaaatatgttcacaccattgccagatcttggctgggtgtgggggctcacacctgtcatcccagcacattgggaggctgagatgggcggatcacttgaggacaaaagttcaagaccagcttggccaatatggtggaaaccctgtctttactaaaaatacaaaaattaactgggcatagtggcaggcgcctgtaatcccagctgaggcagaagaattgcttgaacccaggagctggaggttgcagggaaccaagatcatgccactgcactccagcctgggtgacagagcaagactctgtctaaactaaaccaaaccaaaccaaacaaaatgatcccctccaactacaaacctgttacagcagaaactccaagatcaaaatctcatgtaaatatcataagcttggccgagtgcggtggctcacacctgtcatcccaacactttgggaggccaaggcaggcatatcacctgaggtcaggagcttgagaccagcctggtcaacatggagaaaccccgtctctacaaaaaattagccgggcatggtggtaggcgactgtaatcccagctactgggaggccaaggcaggagaatcgcttgaacctgggaggcggaggttgcagcgagccaaggttgtgccactgcactccagcccaggtgacagagcgagacaccgtctcaagcaaaacaaaacaaacaaacaaaaatatcatcagctcaaaagtcccaaatgtcatcatttaagtcagggacgctgaagactctgggtctgatccattctggggcagaatttctcttcatatgtgcacctgtgagaccagaaaacaagtcacctatctccaaaatacaagggaagagcaggtgtagcatcacagctgcagacactctcattcccaatgggggaacacgggaggaacgaaggcatcaccagccccaggcaattccaaaacccggcaggcagaatgcactaggtgataagaccggggagacccctctgtggcttgggcaccccctaccctgctctgtgtccacggccctgccttcaggacgatccttttccctgaaggttatagcttttagtctgcttgaagattttaaggagtctgacgacctttcattttatcccgtctctgtccctttcagtccaaatttgcagtgttgttgttgatataacatttgtgaaaaccttgcagtcctcctttgaatgccataggaatttctgccagtagacaaaaagggctctgcagacctttcctgtgatgctgtctccactcctggcttctgagatggttgagtgaattgcagtctccttgcctggtctcttcatcactagcaggaggttgtttagacacacccttggccctctctcttttttctttttgttttttttttgagacagtctcactctgttgcccaggctggagtgcagtggtgcgatctcagctcactgcaacctccgcctcctgggttcaagtgattctcctgcctcagcctcctgagtagctaggtctacaggcacccaccaccatgcccagctaatttttgtatttttagtagagacagggtttctccatgttggccaggctggtctcgaactcctgacctcaagtgatccgcccgcctcggccccccaaagtgctgggattacaggtgtgagccactgcgcttggccgttggccttctctttagagtctgcttttcgaacagtgaatctcttttcattttctgcattatatgcgacctgcattatatgcgacctgcattatatgcgacctgcattatatgcgacctgcattatatgcgacctgcattatatgcgacccggataggctgagaatttcccacatcatcaagtcctggttccattttgtctgtcagtttttccctcaatttctctctttccttttgcattttgtgagaagcagcaagaaaaaaaagccaggccacaacttgaacactttgcttggagatctctgcggctaaatcttcaagttcatcatttacagttctgctctccacaaaactgcacagcacaattcagccaggctttctgtcactctgcagcaaagttggccttccctccagtctccagtaccacatttcccacttccttctgagccctcaccagaagaagcaactgtgatgttcatttttctgctaaaattctgttcatgccagtatatgtattctctctctctctctttttttttttttgagatggagccttgctcttttgcccaggctggagtgcagtggtgcgatcttggctcactgcaacctccaccttccgggttcaagcaaatctcccaccttagcctcccgagtagctgggattacaggcatgtgccaccatacccagctaatttttgtatttttagtacagacggggtttcaccatgttggccaggctggtctcgaactcctgacctcaactgatctgcccaccttggcctcccaaagtgctgggattccaggcgtgagccaccgtgcctggcccgtatatatattttctaaggcagcggtccccagcctttttggcaccaggaactggtttcgtggaagagagtttttccacagatgggggcggggtggtaagcggttggtttggggatgattcaagcacgttacgtttattgtgcactttatttctattattacattgtaatatataatgcagtaatcatacagctcaccataatgtaggatcagtgggagccctgagcttgttttcctgcagctagacggtcccatcatctgggggtgatgggggacagtgacagatcattaggcattagattttcgtaaggggagtacaacctaggtccctcgcatgcacagttcacagtaaggttagtattcccatgagaatctaatgccgcggatctgacaggaggtggagctcggacagtcacacacacgatggggagcggctgtaaatagggatgaagcttcgctcgttcacccaccacccacctcctgctgtgagcagcccagatcctcacaggccacagaccattaccagtccatggcccagggggtgggggacccctgctctagggcaacaaagccctctctgccctgctcctcacttccttctgagcccttactgcgagttgttttttttctgagacagggtctcactgttgcccaggctggagtatgttggtgcgatcctcagccttgacctcccgggctcaagtgatcttcccatctcagcctcccaagtagctgggactacaggtgtgcaccaccatgcccggctaattttttcatttttgtagacatgagatccgctatgtcgtccaggctggtctcgaactccagggctcaggtgatcctcccgccttggcctcccaaagtgctgggattccaggcgtgagccaccgcgcccgtctccgcaaggcctttaataccacattcccaccaacattctcttcaaggacgttgagacgttttccattcatggtgcttctaaatcctcccgtcgtctccccattgccggtttcaatgccacttccacatttttaggtgtttgttgcagcagcagcccacttcctcaccccagacctgtatccgtttcctgtggctgccgtaacaaatggcctcaagcctgaaacagcagcattgtggtctctcacgtgtctggaggacagaactctgaagtcagggtcacacgtctgtttccccgcctcctccactcctggggggtccggctttctccacttgtggctatgtcacttgcccctgcctctgtggtccctcggcctcctctcctgtgtgtgtcccccaccacctctctcctgtaaggacacctgtgatggtattttgggcccactcggatcatccaagttaatctcatgtttcgatcacatgtgcaaagtcgctttctccaataaggccacgtccacagattccagggactgggacctggtctctgtgagggccggtgttcagcctgctcgcgttagagaggcagagctttccagaagcagtgtctgacgcttcctggccatcccagggcagcttccccgccgagtacatactggatgaggatggccaagggaacctgacctgcctagacagcaaccactctcacttcatcctcgtggacgacgggacccacggccagtacggggtggagattcctctgaggaccaggctggagaagttcatatcggagcagaccaaggaaagaggaggtaggggagcttgctttcgagggtgattgggcagagagcacagtgggctggtcagagtgtcaggtacagctggtcacgaccaggacgttcaacaggcctggcgtttggcagagagtgcagtgggctggtcagagtgtcaggtacagctggtcacaggtcattcgtggcactcggcagagagcgcggtgagctggtcagactgtcaggtacagctggtcacaaccaggatgttcatggtactcggaacgtcctcagaacacacctgggtttctttcccgtgtctctttatactttgttccaggagggtcatcttctcttgcccattttagccagtgggagggcggtctggggggctggcagctcacctgtgtgctcgcaggtaatgggccaacctacattttttttgggacagggtctggagcgcagtggtgtgatctcagctcactgtagcctcgaacttctgggctcaagggatcctcccatcaccctcccaaagtgctgggattacaagcttgaaccactgtgcctggccctacaattattttaaaccttgatcatggtctgctctcaggttcagaaatcagaatgtacgatagtcaaaacttaggatttgatacctttttcctcataggtgggatgggatgggtttgaggacgtcgggaggtcaagtgcggggttttgcatatcacttgaggagggttcaaagaggagatggtgaacgggaggtgtctgacctgtggctgggtgggctggggtcccttgcagggttccttgtgcatcgaactcccctggagggttcctcaccagcttgtgggccccagccccagggtccaactcagcagctccaggtgggctgagaacttgcattaggagcacgttccctggtgagggcgatgctgcagttcagggaccagggaccacactttgagaaccctgcttgactagtaggagcacgttccctggtgaggacgatgctgcagttcagggaccagggaccacactttgagaacctgcttgactagtaggagcacgttccctggtgagggcgatgctgcagttcagggaccacactttgagaacctgcttgactaggacatctggggtgggatgtgtgggtgagtgtgtgaagacgatgggcccatggggggctcacagacagagtttgctgcctggggaaaggggttgccaagtccttctcaggctccactgctgttgggctggatgaagttcagggtggggctgggcggatggacacaggatggacgtgccgcatgctgctcgcatccacgcgtggcaggttgtgccacctgcttggggcctcagctctgattgtccatagcccctctccctccctcccaagaaagcaggcaggggtggatgggaagcaagcgagcggggaagtgtgggtggcggggggctcttgagtctgctcattgatgtggaacaggcaggtcccctgggaatgtggagctttgactttaaacggcgactcagcactggcaagaggcctcccagcaggtgcttcagtgtgtggttaggctggagccagcagggggcaggggagagtgccctcagtgcagggtcttgccccccacctctgtcccctcactcggctccatgctttgttcaggtgtggccctcactcggctccgtgctttgtttaggtgtggccctcactcggctgtgtgctttttctaggtgtggccatcaagatccccatcgtgtgcgtggtgctggagggcggcccgggcacgttgcacgtgagtatggccaggtgggagggggcatgtgtgggcccgtcctgctgcaggcagatgactgtccaaaagtgcttgtctcagaactcaagactgttggcaagagggcgatgagctttcccaccagaagaagagaaagagcatctacgctgtgtcggggctgcttctgggtgggtggaggacgggtcggaggaaggtgcctggaggaggaggctgggcttggctatgactgggccattgaccggcgtggaaggaaagggtggggccccagggcctggagtgagtggggcgcctctgctcccaggacctgctggggaggctggggggtttctacaactctgcccccaagattcctccaggaagcatttttcaaagtacagggctgtggcccccatcccagatccgtggtgccagcagctgtgtgactgcagatttggcaggcagcttgaatgcgctgctctgccggccttccttcccgaccctaaccctaactgctttgtggcgtgcagggtgcgaggtgacctcacctgctgtaggaatgtacgaggacatatagcctgaggatctggagcaagagtatgggcttttgtgaaggatgggatcacaggcaatgtcccgtttatgtttcatgattgcaggaggtcaaaacagagccttgggggcttgaggctggatgggaatccatagagcactgggtcctcactccctatgcgtgccgagtacccttcacggctcttctgctggggcggctgcacccgcctccttaccccaggccgatgctcatgcacacggcagagtccttcctgccagacagctttgtgtccagtcccttcccgaagtccagcacaccctggagcccaggtgccctcctcatggctctgctcttactgtgggcttttatgaggtcggtaactccaggtccatgcagcgtcccctttgctgcgaggccctcacgtctgcaggtccatgggcaaaaatgctgggagtctttgattctgctggagctgaggcctgagaggtgccaggtgtgcagcccccagtgtgttggggcagctccctcttcccccagagcaggggacgccacgaaactaataagtgctttcagtggatctcggagtagtgttagccagctctgcccttagctggccttggagaattctccatttcagaaagcatcggagcggtgaggacccagtcccgggctcacacccccacctgccttgcagaccatcgacaacgccaccaccaacggcaccccctgtgtggttgtggagggctcgggccgcgtggccgacgtcattgcccaggtggccaacctgcctgtctcggacatcactatctccctgatccagcagaaactgagcgtgttcttccaggagatgtttgagaccttcacggaaagcaggattgtcgagtggaccaaaaaggtgaggctgacgggcacgacggtcaccagcatgtggctgctttgcagagacactgtcagcctggtgggcaggaccaggactcatggaccgatgcggagaacccactgggtctgagtgggtgccagagcgatttgcagagggcagggcccaggtggtaaacctcctggctgggttccggaggtcagatcccaagacagcatgtgaaaggagggtgtgaacctcacccgcagcacaccagggcgggctgggaacgctgcggggctcagtggtgctgtgaaaagggtctgctggattggaggggtgggaggcaggcgctggggaggcctcagccgagtcgggcagcagggcagctgctgagcaatggctgtgggtcgcagggtccagtccagattgtagcctcataggtgagttaatggaggcatgtagagtggcctcaggaggggccattgccccagtccaggggtagattttgggtggcccctgccatgaccccagcctccagagggggtccgttgtgaagggccgtggttggccagccctggccaccccaccaagcccttgaccaggggggtgggctccagtggagagcctctcccctccctgtgcctgctgcttccagggtgacctgactcaattcctggcaggattctttgcaggggctggcactggggccttttcatcctcagtttcccagcaagccagggccggcagagccctctgtctgtgtctttcctgcagacccgggacatctccaggttctgagtggctgacatgcgctttccactgtgttgaatttgggttctgtgggcagtggtgacccccagctgcaggccgcagggacacacctatttggccagattgggcctgtggagagtggattaaaaatgagcaccctcaggaaccacgggtgtcggaagggctgggtggaggtcttggccccgttggccgattcagaagcagagtttctctgactggtgatttgtgggtggcacagtgaccttgtttccttctgtgctttgcgatggtctcagagtgacctcgttctgcacagatgtcttctgagagcgtttttgtccggcaggagaataacatgatgtagctgcaagcgtcagatcagtttgtgaaaacatcgtggtccggctgtgagcggccgctcagctccccatgtcagggcggctttccttccttcccggtgccattgggacttgtcgggcgggccctggagccctctctctgctggttgataaattattcaggcaattctcagaactgagtttaatctgctgttgttgaaaggtgcctatttttaatgcactctccatagccaagccaaggccctgaaagtggtgctttcacacacagccgtcaggcctcagcaggggctcggcattcgctgatgctcctgctcagtggggaggggcccagccatgcagccagggtcagtgcgctcctttaacacgccttctcagagtgtccgtctacactgtggaggagttgcagagctaccctcgggtgctgctgctggtgggcggccccgtcagaggggcccggggacctccctgcaggggctcacagctgtggccaggaagaagttgcccaccctcgctcagccttgcctttctcatctgttaagtaggggtactgagtgctcgactcagacgaggaaacgaggccctggcgtccatatgggctcagacgctgggagctgcttcaccctatgaggacagggcgggctgaagtccaggagacttttatgggctcagacgctgggagctgctttacggtatgaggatgggggtgctgaaagccaggagacctttggctgctggatgagggtggagttcgccagggagctcaggatgtgttttggagttgtcatgaaagctggaccccgagggatggggcaccgttggggtcttaggcatggaggtggagtgtgaggagccctccaggtgagggcagagtctatgtggaggcaatggggccaggctgcggacgaggagagaagcaggggaggccaggtgtggctggcctggggagccagagggagaaggctgaggcttactttgggagcagtgggagccatgggaagatgcgtttgtggagttgctcgccctggacacagggggaaggtgcttcaaggaggagtaactgtagtagacatacctgctagggatgccatgatggatggatggatggatggatggtgggtgggtggtagatagatggatggatgatgggtgggtgtgtggatggctggatggaaagatggatggatgaatagatggatggatggatggtgggtgggtgggtgggccatgtggatggatggatggatggagggataggtgggtagctagatgataggtagattagatggatggatggatggatagatagatagacagacaggtgataaaatggatggactgggcactgtggctcacaattgtaatcccagcactttgggaggttgatgcgggtggatcacttgaggtcaggagtttgagaccagcctggccaacatggtgaaaccacatctgtactaaaaatacaaacattatccaggcatggtggtgggtgcctgtaatcccagctacttgggaggctgaggcaggagaattgcttgaagccaggaggtggaggttgcagtgacccaagatcgtgccactgcactccagcctgggtggcagagcaaaaagtctgtctcaaaaaaaaaaaaaaaagatgaatgaattgatatgatagatagatggatagatagatagatagatagatagatagatagatagatagatggatgatagatagatagtgggtgggaggtagatagaaagataagtggatggatgaatggttggtaggtgggtgtgtgtatggatggatggaaagatggatggatggatggatagctagacaatagatagatacatgtggatggatagatggatacatggatagatggataggtagatagatagatacatacatatatacatagatgaaacacacacatggatggatagatagatttatagatggatagattatgtagatagatggatagatgcatagatggatagatagatcagattatgtagatagatagatggatagatgcatagatggatagatagatagactgatcgatcgacagacagacagataaataagtagacagatagataggcaggtaggcaggtggtgaggagtggcctgggcttagcaggagggctaggaggagcagcctcgcatgaagctgcactatcgtcagggtgaagatccgttgcccttggattgtgttttccacccaacagactctcacgaacatgatgtatttggtccccatggatcttcatctgcaccatctagggcaagaggagatgtggtggtgtcctggccacaagcgcaggcaggacccaaggctctggctgtgtccggggcctcaattctatgtgtcctggaggaggcaggggttcaggagtcactgtgtgtctcacttagaaaatgcttgttgcagatccaagatatcgtccggaggcggcagctgctgactgtcttccgggaaggcaaggatggtcagcaggacgtggatgtggccatcttgcaggccttgctgaaaggtgagggtcagggaacatgggggcaatggggtggaggccagaacgtgagctctgaggacgccaagttctagtcttgaagtgccatgattctgggaaccagaatattcctccttggtcagaaaccctggccagagggcagctggcgacgtgcaggtgggcgcctgcctgtcacctgatgttagaggtatgagctcctttatttgtaactggaatccgagtgcagcctgtgtcatttttacctttgtagtggtcataatttctcataaaacttcagggtggaaagaaagagtgcagaagttgcctctctcaacttcctgcttgctggctgctttagctcctctacctctgatgcaggaaagagtgtagaggtagagcagggcctcaggaatggtgtgatggacttgagctgtagtggctctctgtgtaacttctgttgcttagcctggcccattctccaggccacaaacatcactgtcctcttctcatgccacaggagagaaggcttatgcctctttgtcttacccagctggcacctgacactgggaagccttggtcttatatgtgctcctcccgcccgatgctgggcttctcaccctccagggtcggaggccccaggctgattctgaagggctcagcagagtgggcccaggctgggatcagcagggaacttttgtgataaaggccagactttcatcttgtttctgtgttgatttgagactccccttatcaaggacttgatgttgtgcataaaacctcacacaaacagcgagatgatagactacatattagaccacaaattaagccttaatttatctctcaatagatttaagatagatattatacaaattatcttctctgacaacaagatgaagttaggaattaataatggatgtaaaagtggaaaattcacaaagttgtggaaactaaacgacactaccttacacagccaatggatgaaagaagaaatcaaaaaggaaatcaagaaaccaatgaaaacaaaagcacaatatatcaaagcttatgggacatagcaaaaacaatgctaatggagaagtttatagctataaatgcttacattaaaaaataagatcttaaaccaacaacctaactttacaacttaagtaattagaaaaataagaacaaatgaaatccaaaagtagcagaatgaaggaaatagtacagattagagcagagatcaatgacataaagaatagaaaattgcagagaaaatcaataaagtgaaaaattggttatttgaaaagatcaacaaaattgacacacatttagctaactggactaagaaaaaagaaagaagattcatattactaaaattagaaatgaaagtagggacattactcctgactctacagaagtaaaaggattctgtgaataattgtatgccaacatgttggataacctagatgtgttagtctgttttatgtgactaaaacagaataccacagactaagtactttataaactacctagtactttataaatcaatcactgaccatccttgccttcccagaggatggtcagcatctggcaaaattgaggggccagcatctggcaagggcctgcctcatgtcattccagaatggcagcacatacatgcccttccactggaaggcagaagggtaagggagcacacagatgcatgaaagagagtaagaaagcaagagggagctaaacttgctttttataacaagcccactcttgaaataactaacccactcccaaaataagacattaatccattcatgaaggctttgccctgtaatggatcacctctattaggccccacctcccaacattattatactggggattacatttacaacacatgaactttggggaaaacattcaagccatagcactagatgaaatgaacacatttctagaagcacaaaacctaccaagactaaatcataaaaaaatcaaaactctgaatagacctataagtagtaaggagactgaatcagtaataaaaaatctccccataaaagttttagggctgatagcttcactggtgaattctaccaaatgtttaaagaactaacaccaatccttctcaaactttccccaacaattcaagaaggaaggcttcctaattcattctgtgaggccagcattattctgataccaaagacagacactacaagaaaagaaaactacagaccaatatccattatgaacattgatacgaaattcttcaacaaaatattagcatacaaaattcagtagcattaacaggattatacactatgactacatgagatttattcctggaatgcaaggatggttcaacatatgaaaattaatcaatacaccacattaacagaatgatggggaaaaaacatgattatctcaactgatacatttgacaaaatttgacaccctttcatggtaaaaacattcaacaaattaggaataaaaggaaactaccttgatgtaataaaagccatatatgaaaaactcccagcgaatatcatgttcaatggtgaaagactgggacatagcaaaaacagtgctaatggagaaatttatagctatacatgcttacattaaaaaataagatcttaaaccaacaacctaactttacagcttaagtaattagaaaaataagaacaaatgaaatcttttcctccaagatagaaataagggaaggatgcatactttcaccacttccattcaacattgcgttggaagttcaagccagagcaattagacaagaaaaagaaataaaacttataaattgggaaggaagaagtagaattatttgttcacagatgatatgattttcgtatttgtccattttcacactgctataaagaaatgcccaagactgggtaatttataaaggaaagaggttaaattgactcacagttcagcatgccttggaaggcctcaggaaacttacaatcatggtggaagatgaaggggaagaaaggcactgtcttcacaaggtgacaggaagaagaggtgccaaatgaagaaggaagagccccttctaaaaccatcagatctcatgagaacttactaccatgagaacagcataggggaaactgtccccacaatccaactacctccacctggtctctcccttgacacatggggatcatagggattataattcaagatgagatttgggtggggacacaaagcctaaccatatcaattttctatgcagaaaactaaagattctacaacatacccctgaactaagaaatgaattcagcaaagtagcaggacacaaaatcaatacacaaaaatctgccacatttgccaggtgtgatggctcatgcctgtaatctcagcactttgggaggcggaggtgggcggatcacgaggtcaggagattgagaccatcctggctaacatggtgaaaccccgtctctactaaaaatacaaaaaattagctgggcgtggtggcgagcacctgtagggcatggtggcgagcgcctgtagtcccagctacttgggaggctgaggcaggagaatggtgtgaacccaggaggcagagcttgcagtgagctgagatcatgccactgcactccagcctgggtgacagcaagactccgttcccccaccaccaaaaaaaaatctgctgcatttctatacactaaaaatgaataatcagaaaaggaaattgtgaaaacaattctatttacagtagcatcaaaaagaaaaaaaatactgaggaattaattaaaccaagggggtgaaagacttgtacaatgaaaactgtaaaacattgctgaaagaaatgaaagaagacataaataaatggaaagacatcccatgttcatgaattggaagccttaatattgttaagatgtcagtactactcaaagcaatctacagatccaatgcaattcctatcaaaaccccagtgatttttttttttttgcagaaatagaaaagcccatcctaaaattcatgtggagtctaaagggatcccaaacagccaaaataattttgaaagggaagaacaaagctggaagactcacactttctgatttctaaactcactacaaagctatagtaatcaaaacagtgtggtaatggtgtaaagaaagacatagagggctgggtgtggtggctcatgcctgtaatcccagcactttgggaggccaaagtgggctgattgcttgagctcaggggtttgagaccagcccaagcaacatggtgaaaccttgtctctataaaaaatataaaagctgggcaaggtggttcatgcttgtagtcccagctgtgtgggaggttgaggggagaggatcacttgagcccagaaggttggggctgcagtgagctgtgattgcaccactgcactccagcctgggcaacagagcaagaccctgtctcaaaaaaatcccaaaaagatatggagaccaatggaatagaatagtgagcccaaaaataaaccctcgcatatatggtcaaatgatatttgacaggaatgcaaaaatcattcagtgaggagagggacagtcttttcaacaaatgatgctggataaactggatatccacatgccaaagaatcaagttagacccttacctaacaccatatacaaaaactaactcaaagtagatcaaggacttctgaatataagacctaaactcttagaagaaagcacagggcaaaaacttcatgacaaaggatttggcagtggtttcttggccatgacacctaaggcacaggaaacaaaagaaaaaatagataaattggactttatgaaaattaaataattttgtgcatcaaaagatattatcaacagagtaaaaaggcaacccatggaatgggagaaaatatttgcaaatcatacatatggtaagggattggtatccagaatatatagagaactcctataactcaacaataaaaaaaaaacacaattcaaaaatgggcaaaggacttaaatagacatttctttaaagaagtcgtacaaatggccaataagcacgtgaaaagatgctcagcatcactaatcattagagaaatgcagatcaaaactaagagatatcatttcaaacacattaggatagctactatagaaaagaacagaaaatcacaaatgttggccagtgtgtggagaaactggagcccttgtgcactgttggtggatatgtaacatggtgcagctgccgtggaaaacaggatgacagttccttaaatatttaaaaatacaattcctatatgatccagctattccactcctcagatacatatgccactccccacccccaaatttaaagcagggtctggaagagatatgtgtatactcatgttcatagctgcattatccacaatagctaaaaagtggaagcagcccaagtgtccattgacagaagaatagataagcaaaatgtggtctatacctacaatggaatattactgagctttaaaaaggaaggaaattctgacacatgctgcaacatggttgaacccttaagacattatgttaagtgaaataagccagtcacaaaaggacaaatactatatgattccagttacaagaggtccctggagtagtcaaattcatggagacagaaagtagaatggtgggtgccaggatctgggggagaggtgaatgaggagttaatgtttaatggggatagagttttagtttccaagataaaaagatatatggagaaggacagtgatgatggctgcacaacattatgaatatacttaagaccagtgaactgtacgcttaaaaatatttggctgggtgagctggctcatgcctataatcgcagcactttgggaggctgaggtgggaggatcacttgagcccagcctaggcaacatggagaaccctgtcactacaaaaaaaaaaaaaaaaaaaaactagtcaggcatggtagcacacacctgtactcttagttactcaagaggctgaggtgggaggattgcttgagcccaggacgttgaggctgcaataagccttatgattataaatatgatcacagcactgtgctccagcctgggtgacagaggaagaccctgtctcaaaaacaaaaacaaaaacaacccaaaaagttaagatggtaaattttatgctacacgtattttaccacagtttaaaaacataatgaattttaaaatatcaactttatgaaggttcagcttagagacaataagctccctcaattctaaatgtactgtataacaagcacagacaccgtgacccaccacagtctccatacaggacatctcccctatcctgaatattccctcatggccctttgtagttaagcctccctccagactggctctggaaatcatctgtctgctttctgtcactctagattagttttgcccattttagaacttcacgtgaatgaaatcatacatgatgcattctttcatgtcttgtttcttttgctcagtgcattgtttttgagattcatccatgttgttgcatgtgtcagaactttgttcttttttgtctgtgaaggagtgtcctgttgtgtgaatacaccacaggttgtttttccattcatctgttggggtgcatttaggttgtttccagtttggggctattatgaataaagctgctatttgtcttcatttctcctgggtcaatatctaggagtggaattactggcctttatggtaagtgtatgttttactttgtaaaaaactgacaaacttttctgaaaatattgcattctttttcctgtgtgctggcagtggatgagcgttaccctacatccttgtccacacttggtgttgtcagtcttttaaactgtagccatcctagtggatgtgaagtgacatctcattgtggtttgaatttacattttcctgaggactactgatgtggagcatcattttaaggactttttggccatttgcctgtcttccttctgaaatgtctttcagatctcttgtccatttttatttgattgtttgtcttccagttttcgatttgtaagagttatttatatattcggatacaaatcgttcgtcagatattattttctcatggtgtgtagtttcctttcatattttcttcaagatgtctttgaagagcaggaggcttaaaatttttttttttttttttgagatggagtctcgctctgttgcccaggctggagtgcagtggcgcgatctcggatcattgcaagttccgcctcctgggttcacaccattctccagcttcagcctcccaagtagctgggactacaggtgtccaccaccacgcctggctaattttttgtatttttagtaaagacagggtttcgccgtgttagccaggatggtctcgatctcctgacctcatgatccacccgccttggcctcccaaaatgcgggattacaggtgtgagccacctcgcccagccaatttaatcaatttttctttatggttcatgttctttgtgtcatagctaagagatctctgcccatcccaaggttgcagatattttcttctgttttctgacggcagttttgtagacatagcctttatgtttgggcctaagaaccgctccatgttgattcttgtgtatggtgtgaggtaagggtcaaagttcttttttctttttccccaaataacaacccatgttttaaaaagttaaaccagaaagggaacacagaaactacttgagcaaaataacttgtcctgagaaccagtgaggtggttgttactgttgaacatttacaggcagttgaggcaggaaaggaaatgtgatggcttctgagtcctgagttttggatgttagtgtaagatgcctgccctccagagacctatgtcttcttaaaacagtgaggcccttttcttgcttactgcccacctgtcgcttaggggccagggcatggccaggaggagggcaggggaaacaggagtgagtggacgtgatgaccaaagccccaagattcactgattctgactccgaaatggaacatgcttttgcaaggctgtgtgtatgggaggaggtcactgggtgctgcgcctgtcactttgaattgttgagaggcaagggctcatgacacatccctgactctgacatcatttccctggagggaaatggctttgagctccagatcgaggcccaatatgcacctgttcatctgcagcctcacggagccaagaccactttggccacgagaactgggaccaccagctgaaactggcagtggcatggaatcgcgtggacattgcccgcagtgagatcttcatggatgagtggcagtggaaggtaagtcttccagagcaccccgtggaggggcctactgggcccacatgcattgcaccactgaagcaagggcaggcaaagttcgcattgtctggatcccagcccttcccttgagggtgggtgacctgggcagctttcatcctccccaggttggggacaacagcagcccccatctccagggtctttgagatcaggatgacatggggtgatgaccaaatgcaaccgtcactgcacaatgcttgctctcagccttcagatctgcaccccacgatgacagctgcactcatctccaacaagcctgagtttgtgaagctcttcctggagaacggggtgcagctgaaggagtttgtcacctgggacaccttgctctacctgtacgagaacctggacccctcctgcctgttccacagcaagctgcagaaggtgctggtggaggatcccgagcgcccggcttgcgcgcccgcggcgccccgcctgcagatgcaccacgtggcccaggtgctgcgggagctgctgggggacttcacgcagccgctttatccccggccccggcacaacgaccggctgcggctcctgctgcccgttccccacgtcaagctcaacgtgcgtgctggtaacggggcccatcctggactcgtcttcgcgggctactgctatgttcttagagctctctgtttttaaaattagcttttatttttattagaaaagacacatgctctatcttaggctgcttgggctgctgtaacaaaattccacagatggggcagaaactaccagtttattttctcgaagttctggaagcccgaagtcccagattaaggcaccagcagggctggcttctggccagggcctcttcttgcttgcacgtggctgccctcttgctgtgtcttcacgtgacagagagagaagtctctggtgccacttcctcttctttttcttttatttattttttatttttttgagacagggtctcactctgtcgtccaggctggagtgcagtggcgtgatcttagctcactgcagcctcaacctcccaggctcaagcaatcctcccacctcagcctcccaagtagctgggactacaggtatgcgccaccacacctggctaattttttatttttttgtagagatggttttgctattttggacaggttggtctcaacctcctggcctcaagtgatccgctctcctcaccctccaaaaggctggaatttacaccctccagccaccgtgccttgtctatttttatgtttgagacagggtctggctctgtgacccaggctggagtgcagtggtgcaatcatggctcaccgtaccttccacctcccaggctcaagcaatcctcctgcctccgtctcttgagtagctgggactataggcatgtgccaccacacccagctttttttttttttttataatattttgttgagatggggtctcattatatggcccaggctggtctcaaactccggggctcaagtgatcctcctgtcttggcctcccaaattgctggcattgcaagtgtgagcctccgcacctggcctcacccctctttttataaagagaacacacctatccacttaggaacccacaatgtggcctcgtttaaccttaattaccttcttaaaggccctatctccaaatgctatagtcacactgggggttagggcttcaacatatgaattttaggggggacagagttgcgtccataacataccctttctaaaagttccaaacagtacaaaaggttctgcagggagcgtgatccccctgccctgagccccactgctgcccactgtgtatgctggttttttccgacagtcaggtcagtaacattccaccgtatttttgtgagatgcccagggtgcactgcagctgtgggagagtggatgctgtagtctgcaccctgtgattcaatgggagccctgctctagtctcacctttatttaatggtgagactgccccagtctccaaccttattcaagggaaccctgctctaatctccacccttatccaatgggaaccctgctctaatctccacccttattcaataggaaccctgccctagtctccaccctgattcagtgggaaccctgccgtaatctccaccctgattcaatgagaatcctgccctagtctgtttaccctttttcagtgggaaccttgcagtgactcaatgtcaggaatgatgctggattttgtatttgtatttcctcttgggagtatttatctctgattcattaaggttttacaaagcaaagcatcgatgcctttgagaagattgagctccttttcttctttgacctatgaatttggtgaattattttaatagattttctgatagtgaaacatgtttttatccctgttttgaatttcagcttggcctcagtgcaagtttaatatactggattctcttggcaacattttcaggatgtttgcatcagaatgcttaaggctttgattgcagttttatttggggggctatatttgtcaggctctgatatcaattttatgttagttttgtaaaaaccatttgggaagctttctttccttctccgctccaggacagtttatgtagctggagttaactacttcttataagcttggtcgactcccctgtgagtccatctggacccagtgccttttttttttaattggtaatagttctagtaactttctcagtttcttttctgattatttttctgtttaggttctctatctcttctaagatcacatttttttttttttcctgctagaaaattgtctgtttcctccaggttttccaatcgatccattgttccaggtgagctctgtctgactcttgagaaagacatgggtatgacttggtttctttgttttttgtttttgagacaaagttttgctcttgttgcccaggctggagtgcaatggtataatctctgcttactgcaacctctgcctcctgggttcaattgagtctcttgcctaagcctcccaagtagctgggattacaggcgcccaccaccatgcccagctaattttttgtattagtagagatggagtttcaccatgttggccaggctgatctggatctcctgaccttaggatccacccatcttggcctcccaaagtgctgggattacaggcgtgagccaccgtgccaggccgggtatggcttggttttatacattcacgatctgcacttcttaagtccagtgcgtttatttaagacgctcagttggaatatgcttaggaaggtccaaagcagaatctcaagcttatctgtacctgtggtttaggaagaaaaacacatttcttttttttttttttttttttgagatggagtcttgctctgctgcccaggctggagtgtagtggcgcaatcttggctcactgcaacctccacctcctgggttcaggccattgtcttgcctcagccttccgagtagctgggactacaggtgtccgccaccacgcctggctaattttttgtatttttagtagagatggggtttcactgcgttagccaggatggtctcgatctcctgacctcgtgatactcccgccttggcctcccaaattgctgggattacaggcgtgagccaccgtgccaggccgggtatggcttggttttatacattcacaatctgcgcttcttaagtccagtgcgtttatttaagacactcagttggaatatgcttaggaaggtccaaagcagaagctcaggcttatctgtacctgtggtttaggaagaaaaacacatttctttataatgaaaaaccttcaggaaatttctaggatcacttgaggtgtgttttgtacagtatgtgatgtgggagatggttttttttctacttctggggagcgtttcccagctacctgagtacgtgtttcctggtccggggaaaagcctagccatgcagggaggtgggtctgggcaaggtgccctgtgcttgctcgtgagtgagccatattgcccacctgacagatctttcctagtggcctctctgccagagacactgcaggagagtccctcagggagaagacagtcactgacctattaacatactccactgtgctagaattttgcttcgttgaaagcagctttgatgccatcagataagactggggaacttgaagtgcctggcatgaaacaagagtctacacatgttggtaaaggagttagacgggcgtttcactttctagatgtctccagaacagtgttttaaaaaacttcagtgtgcataagaatgatctagggtgttgctgaaaatgcaggttgtagttctccagggacagtgagatcctgagaaggtcggggctggggtcagggcctgcacctctgacaggctccgccagtgactctgagccaggcggcccggctggggctctgacagttcactgctcaccaggtgcagggagtgagcctccggtccctctacaagcgttcctcaggccatgtgaccttcaccatggaccccatccgtgaccttctcatttgggccattgtccagaaccgtcgggagctggcaggaatcatctgggctcaggtaataagactggcttctcagtctcagcagacacagctataggccagcggccagctggggagtgtggctggagagagtggctggagagcctgaggccaagtgcacgtggaggctgtggaggggtgtggaggggtgtggagggctgtggaggatgtggaggggtgtggagggctgtggagggatgtggaggctgtggaggggtgtggaggggtgtggagggctgtggaggatgtggaggggtgtggagggctgtggagggatgtggaggctgtggaggggtgtggaggggtgtggagggctgtggaggatgtggaggggtgtggagggctgtggaggggtgtggagactgtggaggggtgtggaggctgtggaggggtgtggaagctgtggaggggtgtggaggggtgtggagggctgtggaggatgtggaggggtgtggagggctgtggagggatgtggaggctctggaggggtgtggagggctgtggaggctgtggaggggtgtggagggctgtggagggatgtggaggctgtggaggggtgtggagggctgtggaggggtgtggagactgtggaggggtgtggaggctgtggaggggtgtggaggctgtggaggggtgtggaggctgtggaggggtgtggaggctgtggaggggtgtggaggctgtggaggggtgtggaggggtgtggagggctgtggaggggtgtggaggggtgtggagggctgtggagggatgtggagggctgtggaggctgtggaggggtgtggaggatgtggaggggtgtggagggctgtggagggatgtggaggggtgtggaggggtgtggaggggtgtggagggctgtggagggatgtggaggcttgtggagggctgtggagggatgtggaggctgtggaggggtgtggaggggtgtggaggggtgtggaggctgtggagggatgtggagactgtggaagggtgtggaggctgtggaggggtgtggaggctgtggaggggtgtggaggctgtgaaggggtgtggaggctgtggaggggtgtagaggggtgtagagggttgtggaggctgtggaggggtgtggagggctgtggaggggtgtggaggggtgtggaggctgtggaggggtgtggagggttgtggaggggtgtggaggggtgtggaggctgtggaggggtgtggagggatgtggagggatgtggaggggtgtggaggggtgtggaggggtgtggaggctgtggaggggtgtggagggatgtggaggggtgtggaggggtgtggaggctgtggaggggtgtggagggatgtggaggggtgtggagggctgtggaggggtgtggagggctgtggaggggtgtggaggggtgtggaggggtgtggggggttgtggagggctgtggaggctgtggagggttgtgggcgtctccaacactgggaaggacttggggcacctggagttggagaacaaagaacttagctctaggcaggaaaggaattttttttttttttgagacggagtcttgctctgttgcccaggctggagtgcagtggcacaatctcggctcactgcaacctctgcctaccgtgttcaagcgattctcctgcctcagcctcctgagtaactagaacaacaggcatgtgccaccacgcctggctaattttttataatttagtagagatggggtttcaccatattggccaggctggtctcgaactcctgacctcatgatccgcctgcctcggccttccaaagtgctgggattacaggcgtaagccactgcatccggcccaggaaaggaatttttaaattaaaagttctgctaaaaaaaactggttctgtggttatgtccagggccgagtctcactgggcacgcacaggccgggtggtgccgccctctgcagctcacacgggttccgatgggggctggtgcatgtgctgggcccgtgctgtccgtcaggctttgcagggcaagcagacccctcccacaggccacgcaggagcctgggccatcatcagaggttgtgtattgactggggtggggcttaagttgtctgtatagatgtggtcacacacagtgattgcccagtggcccgcactgtccccgggcctcgttttcatcacctggggcagtgtgttgggttcctcaggctgggttgagcctggctctttagtctcacggtggctcctctggtccccagagccaggactgcatcgcagcggccttggcctgcagcaagatcctgaaggaactgtccaaggaggaggaggacacggacagctcggaggagatgctggcgctggcggaggagtatgagcacagagccatcggtgagctctgccgggcacgggctgcaggccatggctcagccgtgcatgccctcacctggagttcccatccctgggtctcagccccatgtgccctcaccctggggtcctcgtccctgggcctcagccctgcacgcttaccctggggtcctcatcccggagtctcggccctgtaaccacccagtgggttcgtcttgcctgctgctcagatagagcccatttgttaagacagcgagattgcaatagagaaagagtttaattcacacagagccggctgaatgggaagctggagtttcatcacccaaatcagtctccctgaaaatttggagactgttttttttttttgagatggagtgtcgctctgttgcccaggctggagtgcaatggcacaatctcggctcactacaccctctgccctctggattcaagcgattctcctgtctcagcctcccgagtagctgggattacagctgcctgccaccacaactggctaatttttgtatttttaatagagatggggtttcatcatattggtcaggctggtctcaaactcctaacctcagatgatccgcccacctcggcctcccaaagtgctgggattacaggcgtgaaccaccacgcctggtgagactggggttttttaaggataatttggtgggtagggggccaggcagcggggagtactgattggttgggccagagatgaaatcacagcgggtcaaagtgggttcttctcactgtctactattcatgatcacaggggtcgaagtgggttcttctcgctgtctgctgtttctgcgtgtggtcacagaactggttgcaccagatctccagtcggggtggcgtcagtgaagcatcagaatgcaggctttcaaaatatcctgggttttccaatagtgatgatattcctaggaagagttggggaggtttggaatcttgtggcctctggctgcgtgactcctaaaccataatttctaatttgtggctactttgttagtcttacaaacgcagactgctcccaggcaagaagggggttcgtttcgggaaagggccgctatcatctctgtttggaagttaaactataaacgaagttcctctcaaagttagtgtggcctatgcccaggaatggacaagggcagcttggaggttagaggcaagatggagtccattaggtcagttctcggtccctgtctgagttttctccctgttgtcatttttgtagaggcagttccagccctacgtgccctctccctggggtcctcgtccctgggcctgggtgttttgagacaccagccccacatttgccctgtgcccttccctgtgtcctggtggtgctgtcccgagtggttgccctctgacccgtccccagggctcagtgattgtgacctgctgctctgacggggctctcatatctccgcccaggggtcttcaccgagtgctaccggaaggacgaagagagagcccagaaactgctcacccgcgtgtccgaggcctgggggaagaccacctgcctgcagctcgccctggaggccaaggacatgaagtttgtgtctcacgggggcatccaggtgacctcccaagagccccttccagaaacagacgcctgtggtgcctgcagggcggacacagcctcctgttcgtgcagttggcacgcacactcacacaggcttcagggccctcagcagctcggggacagcgcctgacccctcggccacctgctccaggctctggcctcccattttgcagatggggggaagctaacatgaagcaaaagcaggagctggtggccatggagatcgcaattcacctccccatggatgttcctacctgggagcggcaggcagaagcccaggtggctctgggaacggcgtctgccctctctccctggagggataagcgggacacggcgtgtcctccctggagcagcaggggctcccaggcatggctgccctcagcatcgccctggaacccccggcagggcctggctcccagcgagtgccccttgcacgctgggcttccttggagcgccgagctattgccaagtccatgagctcccgtcatgtcctgggctgtgccaggcctagggaggcctggggaagggtcctgtcccccactgcagagctcagaggggccagtgctctacagcctgcaactgcggggccttcgaagccagcagagatggggtcccatagcttgaggtcaggtgaaaggcgggattggacacccaaagccccagggcaagctctgtgtcttcaccactttctgctgtgagactgcaggctagctctgtccactaggcaccccgagtcctcagcagacagctgacgggcaccatctggggcacagggctgggcactgccatcctgagactgcccccatccgcaggccttcctgaccaaggtgtggtggggccagctctccgtggacaatgggctgtggcgtgtgaccctgtgcatgctggccttcccgctgctcctcaccggcctcatctccttcaggtgctgcagggctgcggggctgcgggactgtggggctgcggggctgcgggagaggctcctgggggctcaggatcttccctagatcccctcgctgggagcaagtcatgtgtcctcagaattgtccctggatcctggggctgtagagatgggggtgggaagcagagcagggccccacgtgctggaagcacctgccttgccccagccccagcactgatctcatgatgctgatgagcccgtccctcagccacatcagcctggggttggggaggccaggaaagatggtctcctgctcctgccggcactgtagacctgagccagtctgcggcgtgggcagttagtgcaggtctgggatgcgagcagcgagctgcggctgagtgcctccctgtcctcgcagccgcagagcctgtattgatggaatcgctttcccttatgaaggaggaggacacggctggccatggttgaagacctggcctggcctggtgtccccacctgcacctcctcagaggcttgctggggcgttgtgggatctgctgtgttttactgagggctggatggaggctcagggtctcctgggagtcagggcagattcaagaccccagcgaggtggctgagccccttctgcaacccgcagtccacactgcctgcctccttccctttctcctcacggccaggatgggtacttgagtgttcaggaatcctggtgggaaactgaggcagggaggagcggctcaggtgtcctaaagcagtgctggcttctctcctgctctcccgaggatggcagagccgtgtcactgatggccgcctctgctcccgttccagcggcccggggatagggacctgggatcagggcacaccacagggggagtgtggtcagccccacccccattgaggacggcaaggaaagcctgtccccatttacaggagggtgactaaggcctgagcgtccactgagcactgggagctctgaagctggggcccacccaaggctgggcttggggcaggctgggcctccctgtttgcagccattaaggtcatggccatgggcagggcgtcagcgggcatccctgtgtcctcactttgctgggctgtggggtccagccccaccccggtggctgtgtgtgaggctcccaggctgtgctgtgccggctccgcctgtagctgccgttatggccccggatccctgagtgcttttgcctctaaaagcacatctctctgaggggcacgggggatcacggggtggccaaagcctgtggaggtcaggaccctggccctggtggtcactgtctcctctctgctgtgacggccgcagggagaagaggctgcaggatgtgggcacccccgcggcccgcgcccgtgccttcttcaccgcacccgtggtggtcttccacctgaacatcctctcctacttcgccttcctctgcctgttcgcctacgtgctcatggtggacttccagcctgtgccctcctggtgcgagtgtgccatctacctctggctcttctccttggtgtgcgaggagatgcggcaggtacagccccacccgcttttccacgccccagcccggggccacccacttggctgcattctcataggggacccatggcttagagcccaccccatctagcctgcccagctccctgcaagctgagcagagccggtgtttcctccccaaaatgggtggctggggcgctgccctccaagcccctccctcctcatgccccctgcgcctgcttccctgctttccctcggcccaggcatccttccctcctggagaccggctgatcagctcaaggtggatgccctgaccttgtggactatgagtatgtcccttcccccaggaagagcagtgcaaggtgtggggtccctaagacccctctcacgttcaataacgagccagaaggacccacagacgctggggagtggcaatgctcacttatggtttattaagcaacagtctacagactaaaccagccagggggagggacgcagctgcatccaggacagctctgagcccagggcatccggccagtccctccctgtggaggtgtgggtggcactccatcctcccggtgatgatgtgtggcctcatgcatggaggcacgtccccagagaggctcgcgggccttggtgtctactggaggtcagtcacagaggcgaggctgacaccacatggttgacctcagtctccagccctccaaaggtcaaactgaaaactgcccggggccccaccccaaatcacactgtgggaccacctggcatggcccaggccccaggaacaaagacaccctcatcaggcggacattccaagggctcagaggctatctccctggagctgggcgaggccaagctgccccccaggtggggcgaatcccttactgtgtggggtctccactgtgcccccacggtgcctgcacctgctggcagccggtgaatgggaactaggtccttggaaccctcagggcagtggtgagggggtggggtcagcccacggggcagtggtcctggcttagacttacctctgctctctaaccttggtggaccaccaggcccccagttaccccagttagaaagcagtgtgcactgtgtaaataccactgcctactggggccctgggggaggcaccggcgtccccaggaaggaagatcaggtccaggacttggcggggcctgggagctgtgctgtggccctggctctgctgggctctccttggctctcctcttgccacagggcttctgccaccagaccctctctacaaggggccagaggcctccatgcacccccagccccagccccatgggcagcagcctgagagcagagggggcacttccttctccctgcatctgtctgtgatccagggagggccctggttggtcctgctggtcacctgccccacctgtccagctgctgggtcctggggcctggggctagggagggtgtggggactcctgccaagtaggccaaatgggggctcccacagcccctgccaggtcctgcactcttggcctgctaaagaaacagtgtggcccctgacagaacaaagatccttgtgggaaggcagctggcgcctgacattgagggcgctgctccaacacacacacacatgcacacacatgcatacacatacaggtacatgcacacacatgtacacatgcacacaaatgcacacacacataggcacacacacatacatacatgcatatgtacacacatacatgcacacacatgcacacagtacacacataggcacacacattcatgcatatgtatacacacatgcacacatgcacacacatgcatacacacatgcatacacatacatgcacacatatacacatgcatacacacatatgcatggacacacatacatgcatatagagatgcacacacatgcatacacatatacatgcatgcacacatacaaatatacacagataaacacatgtatacacatgcacacacatgcatacacacattacacgtgtgcatacacacaaatatacacatacatacacatgcacatacatatacagcacacacatgcatacacacatacacatgtacacaatatacacatacacatatgcacacatacatacacacatgcacatacacatgcatacacacatacacatacacacatgcacatacacaaatatacacatcacccaagcacatatacacatatacatacatatgcacatgaacaaacatgtacacacatacacacacatatatacatatgcacacatgaatgaacatacacatatgaacacacacatacagacacatacacatatatacacatgcacacacaaaaacatgcaaatacacatatacacagagacacacagatacacatacacatgcacacacacaaacatgcatacatacacaatacatgcaaatgtatgtgcatacacatatacatgcacacatacatgcacatacacatatacacacatgcatacacatacaaatacatgcagacacatacagaatgcacacatacatacacacacatatgtgcacacatacatattcacacgtatacacacatacatgcagaatatatgtacatacacatatatgcacacacaggtgctgagtgagcagggggccgaggtagctgctgccagcgctattctgcattgttcctccacgtcctgttcccatctccctcactgacccagctctcttcagatcagaaccaatgttcggatttgctgaccgtgatgatagtgatgatagtgatagtgatgatagtgacagtgatgatagtgacggtgatagtgatgatagtgacagtgactgtgattgtgatgatgatagtggatagtgatatgacagcgatggtgacagcaaggatagtgatgatagtgacagtgatagtgatgatagtgacagtgactgtgatgatagtggatagtgatatgacagtgatggtgacagcaagggtagtgatgatagtgacagtgatagtgatgatagtgacagtgactgtgatgatagtggatagtgatatgacagtgatggtgacagcaaggatagtgatgatagtgacagtgatagtgatgatagtgacagtgactgtgatgatagtggatagtgatatgacagtgatggtgacagcaagggtagtgatgatagtgacagtgatagtgatgatagtgacagtgactgtgatgatgatagtggatagtgatgtgacagtgacagtgaggatagtaagagtgacaacctgtctgccttcctaccgcccctcttcccagtagctcttctatgaccctgacgagtgcgggctgatgaagaaggcagccttgtacttcagtgacttctggaataagctggacgtcggcgcaatcttgctcttcgtggcagggctgacctgcaggtgagtggcctcaccccgatggcgggcccgtctgaggcagccagccctgcaggggatgagcacaggccgggcccagaaccagccacaccgggtgaggctcagctcgtctgtgaaccctggattgtcatctgtccaatgggtgtccaggcaacagcgccccacctacccttgggattgttgagggagcacagaaggggcatgagagctcctggcagagctgagattgtccatgtgcaaggggccatagatggcaacctctggaattgtcccagctccacggacacgcggctgccgctttctccctctgcctccctactgtgggctcactgcactgcctgtgatgctctcgtgtctctgcgaggccgcggccccctttctcggaggcaatagggccctggctaactgctggctctccaggtgcccccatgccaggctgccctgtggggctgggcgtctgaagaaaagtgggaggctctattcctcaatctcatgccagctttgaacacctgggatgcagggcccaccagagccctttgcctccagggcccacctgggctaggacaggtggaggggcgacgggggacagctctgggggctgctgtgagcaggtggctgagatgtgtgtgcttctgcccggcggccaggctcatcccggcgacgctgtaccccgggcgcgtcatcctctctctggacttcatcctgttctgcctccggctcatgcacatttttaccatcagtaagacgctggggcccaagatcatcattgtgaagcggatggtaagggggcgggggcaccggctccatcgcggcctgcagcccagggtgggcctcggggagggcaggccccttgccagtggctcggactggggcttaaacacacctgtaggttccccgtccctgctttgccccttgggctcccaagaatgcccttctcgtatctttgcctgtacgtcacctcttccaggaagccttccctcattctcccctctgatccccactcattcctggcctctgattcagctctaggagctttcctccttggtcacggttatgtctgaccgcactcattcctggcctctgattcagctctaggagctttcctccttgggtcacggttatgtctgacccctcttgcactttgtggtgctagcacaaagatgtcggcagtccacgagggtgtgggggcagccccaggactgctcctgggagcctcctgcatgccgtgtctgtgctgtgagtggcagtgctgtctccaccgctgctgggcctgcctctgggcccagtgagcatcgggggccaggagagtgtagcccacacactctctgtcctgcagatgaaggacgtcttcttcttcctcttcctgctggctgtgtgggtggtgtccttcggggtggccaagcaggccatcctcatccacaacgagcgccgggtggactggctgttccgaggggccgtctaccactcctacctcaccatcttcgggcagatcccgggctacatcgacggtaggagccgggcgccatgggagctcgggtggtgctgccgggaagcaggagagaggctggaaaggggccgcatgagtgggagtgaggccggctccatcagggggtcctgcggttcccacctggccggtgtcctccctgggggcattcattccccagctcctgtggcaggaagtagaaggggccccaccaggggagggaggaggggggcctggtgggggtgagtggtgccacgcagaggtcagagtgggccgagggcacctggggcatcagctgacagccccctgaaatggaatgtcaccctgtatcccctttccctctcacctcaatcagaaataacttccttcttctcttgatggaaataattcattcctcccttcctcccttccttccttccattttttgacagggttttgctctgtcacccaggctggagtgcagtggcacgtccacctcctgcgctcaagtcctcctcccacccgtctgctgagtagctgggactgcatgtgcacgccaacacacccggctaatttttgtattttttgtagagatgggggtttcagcatgtggcccaggctagtatcgaactcttgagctcaagtgatccacccccttggcctcccaaagtgctgagattacaggcgtgagccaccatgcctgccagagagaacacttttcatatagaaggttttttttttttttttttttttttttaacagcttcattgagagaaatttcacctggataaagtgcacctgtcagtggttttcagtatctttacagaatctaactttataacatctgcatcaccctgaaaagaccctgcatactcacagtcactcccgttcccctcccctcagccacagccacccacgaagctacttgtgagctgccttttctgggcgtttcatagaaactggatgatgtaataggcagtctttggtgtctgacttctttcacttgatgtcccgttttcaaggtttgtcaccgtgtatcagtatttacttcccgtttatggctgaagaggaccccgctgtgtggacacaccacattttgttcatccattcatcagttggtggacatatgggttgtttccacttttccttttttttaaaaaaaattaatatttaattttttaattaaaaaattttaaattaattaatatttaattttttttttcccctagagggagtctcgctctgttttctttttcccgagagggagtcaggccaaagtgcagtggcacaatcttggctcactgcgacctccacctcctgggttcaagcaattctcctgcctcagcctcccgagtagctgggattacaggcacctgctaccacgcttggctaatttttgtatttttttgtagagatggggtttcaccatgttggacaggctggtcttgaactcctgacctcaggtgatccacccgcctcggcctcccaaagtgctgggatgacaggtgtgagctaccgcgcagggccgtttccacttttcacatgctgtgaataacgtagcatgaacagttatttacagggttttgtgtgggtatgtttttatttctcttagacacctaggaatgcacggctggctcatatgggaactccatgtttaagtttttgtggacgtgctgggctgttttccaaagaaccggccgcattccacattcctgcctgcccagtcccaggattccaatttctctaccttcttgtcaacatttgttattgtccattaaaaaaacaaagctcgcatcccggtgggtgagaagtggctctccttgtcgctttgacgggcatttctctaaggacccgccatgctgagcatctcctcctctgctaacctcgtcgtctgtaagtcttctttcaagaaatgtctctccctctcctttgccctttttttttttttttttttttccgacagggtctcgctctgtcacccaggctggaatgcagtggtgcgatctcagctcactgcaacctctgcctcccgggctcaagtgattctcctgcctcagcctcccgagtagctgggactacaggcgcacgccaccacgcctggctaatttttgtatttttagtagatacagagtttcaccatgttggccaggctggtctcgatctcctgacctcgtgatccacccgccttggcctcccaaagtgctggcattacaggcataagccactgcccccagccatctttgcccatttttcaattgagttgtcttttatattattgagttgtcttttatattattgagtcgtaagagttctttacgtaaggatgccagtctcttaccaaaggtatgatttgaattttttttgtcaatctgtgcactgacttgttattttctttatggtgtcatttgatgcacgagcttttgaaattttgatgatgttcaacttatcaatctctttgatcattgtgcttttggtgtcctagcgaaaaccattgccgtgatttatgcctgtgttctactaagtgttttatagctttcgctttttgtttgccctggtgtgcggtaagggtcagtcttcgttgtggctctcctgttgtcccagcactatttgttgacaagactgttgtttccccagtgaagcatcttggcatccttgttgaaaatcagtggaccattaacataagggcttatttctagagtctcagtttgactccactgatgtctgtccttgtgccagaaccacactgtcttggtgagcatagccttgtagtaagttttgaccgcactgtcttggttggcgtagccttgtagtaagttttgatcgtgctgtcttggttggcatagccttgtagtaagttttgaccgcactgtcttggttggcgtagccttgtagtgagttttgactgcactgtcttggcgtagccttgtagtaagttttgactgcactgtcttggtgtagccttgtagtgagttttgaccacactgtcttggttggcgtagacttgtagtaagttttgaccacactgtcttggtgtagccttgtagtaagttttgactgcactctcttggttggcatagccttgtagtaagttttgaccgcactgtcttggtgagcgtagccttgtagtaagttttgaccacactgtcttggcgtagacttgtagtaagttttgaccgcactgtcttggcgtagccttgtagtaagttttgatcgtgctgtcttggttggcgtagccttgtagtaagttttgacctcactctcttggttggcgtagccttgtagtaagttttgacctcactgtcttggttggcgtagccttgtagtaagttttgatcgcgctgtcttggtgagcgtagccttgtagtaagttttgaccacactgtcttggtgagcgtagccttgtagtaagttttgaccgcactgtcttggtgagcgtagccttgtagtaagttttgatcgcgctgtcttggttggcatagccttgtagtaagttttgaccgcactgtcttggttggcgtagccttgtagtgagttttgactgcactgtcttggcgtagccttgtagtaagttttgactgcactgtcttggcgtagccttgtagtaagttttgaccacactgtcttggttggtgtagccttgtagtaagttttgaccacactgtcttggtgtagccttgtagtaagttttgactgcactctcttggttggcatagccttgtagtaagttttgaccgcactgtcttggtgagcgtagccttgtagtaagttttgaccgcactgtcttggcgtagacttgtagtaagttttgaccgcactgtcttggcgtagccttgtagtaagttttgattgtgctgtcttggttggcgtagccttgtagtaagttttgaccgcactgtcttggttggcgtagccttgtagtaagttttgacctcactgtcttggtgagcgtagccttatagtaagttttgaccacactgtcttggtgagcgtagccttgtagtaagttttgaccacactgtcttgttgagcgtagccttgtagtaagttttgaccacactgtcttggtgagcgtagccttgtagtaagttttgaccgcactgtcttggtgagcgtagccttgtagtaagttttgaccgcactgtcttggtgagcgtagtcttgtagtaagttttgactgcactgtcttggttggcgtagccttgtagtaagttttgacctcactgtcttggtgagcgtagccttatagtaagttttgaccacactgtcttggtgagcgtagccttgtagtaagttttgaccgcactgtcttggttggcgtagccttgtagtaagttttgaccgtgctgtcttggtgagcgtagccttgtagtaagttttgaaattcggaagtgtgagtcctaatttgttcttttccaggattgctttggcctctgggtcccttggcttcacaagaatttttggatcagctcatcaatttctccaaaaagggcatctgtgattttgattgtgaacatgggatgtctttttgcttatttaattctttaatttctctcaataatgttttatagtttccagtaataagtcttaatgcttcttctgttaaatttattcctaaatattttattattgtccaagctattataaatagaattgtcctattgatttcatttcaaattgttaatgactggtatgtagacatacattgtcttttgtagattgatcttgaactctgaaaccttgctaaacttctttattacttttaatagttttttagtggatttgtcatatacgagaccatgtcatctgcaaaaagagagttttacttgttcctttccaaactggttgccttttatttcttcttcttgcctaagtgccctggctagaacctccagtacaatgttgaacagaagggacaatgggggacatccttgctttgctcctgatcttaagacgagtccactgatcttagggaacaagcctttcaccattaagtgtgatgttagctgtggggcttttataaatgtcctttatcaggttgaagaagttcccttctattcctagtttcttgagtgtttttattgtgaaggagtggtagactttgtcagctgcttctcctgcacttattcaaatgttcagatggtctttgatccttttactattaatatggtgcattccatcaattgaccttcgaatgttaaaccaactttatgttcctgggacacgtcccacttggtcttggtgaataatctcttttacatggtgctggattcactttgctagctgttttttgatgatttttgcacctatattcatgaaggttattggtctgtggttttcttttcttgtaatatgtttgcctagttttggcaccaggataatactggcctcataaaatggcttaggaagtagttcctcctcttatattttggaagagtttgtaaaagagtggttttaattcttccgtgaacatttggtagaattcaccagtgaactcctctgagtgtggacttttctttgtgtgatgtttttaacttactaattcaatctctttatgtgttataggtctatttatattttctatttcttctccagtcacctttggtagtttgtgtctttctaggaatttgtccattcatctagatcatctaatttttttagcatacaattttctctaggatttcctttgagttctttttctttttgtaagattagtagtaatatcctctctttcatttctgattttagcaatttgagccttctctctttttttccttgatcagtcttagctacaaggtggtaattatttttgttgctctttttcaagaactgagtttggtttgttgacattcattgtttttgatttctcgatctcatttatattctaatcttcattctttccttccttctgcttgcttttggcttgtctcagggaaagcatccagtctttcccactgggtatgatgttagctgcagggtttttgtaaatgtcctttcaatcaaagaggttctctttgattcctaacttcttgagtgtttttattgtgaaagggtggtttgctcttctttttctagtttactacagtgggaagttacgttaataatttcagctcttctttattaatataggaatttatagccatcagagtgcgtttctatcttagaaaattagtaacacattcaaaataggtttgattacccaataatgcattgctcattgttgaacaattttaaaattcaagataagtataaggaaagaatgttattcataatttcacctcccggagttaactactgttaacaacttactatgtttccttagagatttgtttaaggtagaagctgtttccatattcaatagcccttactttctatgcacgcaggacgctatttttcttcacaatcacccgtttcacttgtcgatacattgcctctgcaacatcttcccttttccacatctccacgtctcccttctctttgggatagttgttatttttttccttttcaattctttttttttttttttttttttaatttttgagacagacatttgctcttgttgcccaggctggagtgcaatgaggcaacctcggctcactgcaacctccacctccctcccggattcaagtgattttcctgcctcagcctcccgagtagctgggattataggcgcccgccaccatgcctggctaatttttgtatttttagtagagacaaggtttcaccatgttgaccaggctggtctcaaactcctgacctcaggtgatccgcccgccttggcctcccaaagtgctgggattacaggcatgagccactgctcctggcctttccttttaaattatttccaccaaattgaactccccaggcttgggacctggtgctggccctggctgggaccctggcagtgccctggtgggtggcacaccctgggcggaggcacgggccagcctgggtgcagctctgcccccggggcctcctacctgcatctggctggagacagatgcctctttctggacttctggcccagaggtgacagctgaggtcacccaaatgagcagcatcaggcctgcgggggacctggcagtgactggaggcctcgagggccccctcctgccaagctcctcttgactctgtgttgttttcttggctcacccacccccattcccaacgccaggtgtgaacttcaacccggagcactgcagccccaatggcaccgacccctacaagcctaagtgccccgagagcgacgcgacgcagcagaggccggccttccctgagtggctgacggtcctcctactctgcctctacctgctcttcaccaacatcctgctgctcaacctcctcatcgccatgttcaagtgagcgcctgggtggggctggcgtgcaggtgggtgggtgggcggcgttcctgggccgcagtggccatgctgtctccagggtctcgtggacagtgtggatgatgggctggtgcacagaggcgcgtcactcatatcctggtggagtgtgcacagccactctctgtggtcactgctgcgtctcttgagctggcgtgagtctgtctcttgagctggcgtgggtctgtccttgtggctgctggggacccgcggtgctgtggatccacaagggccctgctcacggtgctgctgcggaggcagcctcctcccgcagggcagggatgttggtgtcagcctcgttccttctgcgcaggcgcagcattattcatgggctcactgctctacccggggagcgtgctggggccgctgctgctcagggctgtccccttgtcaccccaagggctctgcctgtgtctccctgttactgagcaaaagggctcgctgcccgatgtgcaggaggccaatactatgacaccaggtttttgagaaaagaaaagcttttattctaggccaacccacaaggagacaggggcgcagttcacgtctgtctccccgcgctggctttaatgcagtgtttctattagggaaggttcgggggtgggttcttggatgagtaagtggctggtggaagaaaagggggttctggaaagttatgtctcctcataggtctcgtgtgcacatttgggcggagttactgggaccctggggtggaaactcgggctgtgcagactccagctggccacagtggttccagctgtgacctcagccagttccaaaagctcctgcaagcgagtctcagcatcccagcaggtggcttcttttcccgtctgccatctgtaagtgtgagcatttcggttagttgctgggttctttagctctttggggccggttccccagccctagacgtgttcctgctgcccccaccgtgtgcctcagacggcgctggctctgcggtgccttccccagagctccgatccatctgtggacggctctgtgtctgccctcccgtgccattggggtcttcctcatctgcacgtcttcacgtgctttgctggttttgtggatttgcacacacgtgtccacctcctctgggcctggtgtttgtggcatctgtggcagtttgaataacagccccagggaggtccacactcgaaccctgtggctatggggccctatgtggcaaaagggactgggagggtggggttaagtggaggatcctgaggtgggaaattatctggggttatctgcatgggcccgacatcatcatgaggggccgtggaagagggaggcggagaaggaatgtgacggtggcagtgagcgtcggcgggaggggagagcctcagcccaggaatgcaggcagcctctggaaggcaggaaaggcaaggcatggaggctcccgacctacgggaggagcacagccctgccgaaccttggttttagcccagtgagactcctgacctccaggactgagagaagagtctgattgctttaagctgccaaggccgtggcggttcactacagcagcatcaggagacccatgcagtagctgtttcttctctttgaaaatgtctaggattttctttaaatcctagtgtcttgaagtcttatcatagaacttttggaatgttatttgctattgttgcttttgaaacaaggagtacaaaataggtggctgtccatccggcccctggtggacgtggtcctctggggtcgtatctctgatcagccgcagcagctgtgggccccaggctttgggggttctgttttgctcttgcagcttttaaacttagaacaaattaaatgctgaggacctcacaccagaggcagcataaaaaagaactccagggaaccaggaggccacgcagaatgaaaacacaggtgtttggggtcctagtgggccccagggttggctctgggggttctgtggccaattcctagccctgacagtggagctgaggagcccagcacggctgcggagctgtcatggtccacagaaagcccagtctccccacgttgcccccataattcagaaagcctcccaggccctcagagcccttcccagcatctgcagacagaccctgtgctacccaggactctgaaaatccttgtgttcctggttttgttaggaaccaaccgtttctcttcttgtttcattggctaagttgctgaggttgccacctttcagaacgtgggttctgaacattgagagaacccgagcatgggccaggactgtcatctcgaggccaaggggctggtggcaggacactgtccctgcagcaagtatggcacccacacttccggctcccactgcggagggctctgtgcctgtcaccctgagacacaccaaggaggcccctgcagccctgccccttccacatgcacccctggagggtctggctcttgtgctcgtcagaatccacagatcaggtcctagagttcagtgccagacagtgtctgtctcctgataaacacccacttcgtgttattagccagtgaggcttataatatcgaaagtctgtgtgcttctccttttttcttgctttggttcccaggaagcctggaattgtgaggtctgtgggctgagttctgtgcctggagctggcctcccgtgtggcgtggctctgctctctgtggcatcacagtgggcacgtgggcatggctctgctctctgtggcatcacagtgggcacgtgggcatggctctgctctctggcatcacagtgggcacgtgggcatggctctgctctctgtggcatcacagtgggcacgtgggtgtggctctgctctctgtggcatcacagtgtgcacgtgggcgtggctctgctctctggcatcacagtgggcacgtgggcgtggctctgctctctgtggcatcacagtgtgcacgtgggcatggctctgctctctggcatcacagtgggcacgtgggcatggctctgctctctgtggcatcacagtgggcacgtgggcatggctctgctctctgtggcatcacagtgggcatgtgggcatggctctgctctctggcatcacagtgggcacgtgggcgtggctctgctatctgtggcatcacagtgggcacgtgggcgtggctctgctctctggcatcacagtgggcacaagggcgtggctctgctctctgtggcatcacagtgtgcatgtgggcgtggctctgctctctggcatcacagtgggcacaagggcgtggctctgctctctggcatcacagtgggcacgtgggcgtggctctgctctctggcatcacagtgggcacgtgggcgtggctctgctctctgtggcatcacagtgggcacgtgggcgtggctctgctctctggcatcacagtgtgcacgtgggcgtggctctgctctctggcatcacagtgggcacgtgggcgtggctctgctctctgtggcatcatagtgggcacgtgggcatggctctgctctctggcatcacagtgggcacgtgggcgtggctctgctctctgtggcatcacagtgggcacgtgggcgtggctctgctctctggcatcacagtgggcacgtgggcgtggctctgctctctgtggcatcacagtgggcacgtgggcgtggctctgctctctgtggcatcacagtgggcacgtgggcgtggctctgctctctgtgacatcacagtgggcatgtgggtgtggctctgctctctgtggcatcacagtgggcatgtgggcgtggctctgctctctgtggcatcacagtgggcacgcaggcggtgagaggggtctgttctgggtaaacaccctgacctcgaggtgttgctttctcctccctgacagctacaccttccagcaggtgcaggagcacacggaccagatttggaagttccagcgccatgacctgatcgaggagtaccacggccgccccgccgcgccgccccccttcatcctcctcagccacctgcagctcttcatcaagagggtggtcctgaagactccggccaagaggcacaagcagctcagtatgccagccccagtgcctctcctgaatgtcctggccacccgggtgcagagggggtggagatggcatggcagctctgcccagaaccctggacgctcagcaggcgtgcaggtcactcaggctgctggccttctgctggccttgagcaagtggtgggggctgagcccagaggcccccttgggggcaggtgtgcgatgggctcttcctgccactcaggactggccccctcccacggggcccccccggtgggtcagggcttcagggcccacctcctgaggattccaggtcccctggtctgtccgcccaccctgacagagaacaagctggagaagaacgaggaggcggccctgctatcctgggagatctacctgaaggagaactacctccagaaccgacagttccagcaaaagcagcggcccgagcagaagatcgaggacatcagcaataagtatgggggctccggtgggcctgggggcgggaagcctctgggggacctcctgcaggtccacaggcaccatgagtacatgtcccacctggggaggcccagcaatgcctcaccggtgagggagcgctgtatcccgtggcccctgcaatgctgcaggcatccgggcctgtgcccacagctgacccaggaccctctgcggtccttaggaaggctgggccccacagggcgcagggtcagaggctgggagggaagccttggcggctgggggaggggcaggttggcccgcaggatccggcttggaggcctgggggcatgtgcacacggggtccaggctggtttgggggtggtttgctctgtgagcttgttggtgcacagccttattatagcttctgcaggacctcggcagcccagccctcggggtcagccatgctcagcaccgtcctccctctcagctcctcccatcttgcttctttccaaggtgcgaggtcagtgttgggggaacatctgctcccttctctccactgccaggccttccgccctgctaggtgtcagcagggcctaatggcccagcagcgggcagcaggaagggctgcccccagtgtcctgctctcagtgtgcgtctcaccatggcatgagaggaggagggggaaatggacacggtgccacctagttatggccgtgtggaggctcctgcagccacaaacaggagcatcctggagctggcaagggatggccaagaccaggccaagtgccctcccccttagagacatgtatgtactcctgcctttccatacctccctcaccttgtctgtaagatggagacacgatagtccctgtctcttggagttgtttccagaatacagtggggtcctgactgtaaagaattgagcacatatgctggaactataaccagggatctgctaacgtggctggtgcttttatcatcacccttacttatgagtagtgggggcggtggtggtgatggtgatgatggtggctgcgatggtgatggtggtggtggtgatggtagtggtggtagtggtgatgttggtgatgatggtgatgtggtggtgattgtgatggtggtggtgttggtgatggtggtagtgatggtgatgatgatggtgattctgatggctgtaatggaagtggtggtgatggtggtggtgatggtagtggtggtgatgttgatggtgatgatggcagtggtggtggtggtggtggtgatggtagtggtggtgatgttgatggtgatgttggcagtggtggtggtggtgatggtggtgatggtgcttctgatggtggtaatggtggtagcggtgatggtggtggtggtggatggtaatggtgatggtgacagtggtggtagtgatggtagtggtggtgctggtgctggtggtggtgacgatggtggatgtggtggtggtgatgatagtgatgatggtgattatgatggcaatagtaatgacgatggtgacaatgtgaggaccttaatgaactagctgatgtcaaagccccttctagctcccattctgagtgaactagatacacgtgtcctgtttgcttgagtctgggcatgatgacttccagttgagcccttggcatgctctttgcctagaacagtcttctcccagagagagtcaggacttgctgtctctctctattcaagcctcacttcattggagggcctttcctgccctccacccaccctgtccccatcccctgtcgttctggaatctggatgttggttggttggctggtgggtttgtgggttgtgtcatgtctaactgccaggctccatgtgagagtagggacagagtcccacatgttccccatagtatcctgggatgtagagcaggcccagtgcctagaaggcactgaggaaatcctatgcaattctggaactgctgttagttcctggcctggcagggttgcaggaggctggggtcgctggtctccaggcctgctcagccctgacgtttggctctgatggtccacttacagaggaggggggcctggggccatgcagtgccctgacaaccttctcttacttgctgttgccaagtacagctttgatggatggcctcgtctgggactttgagcagtggccatgcccagggcccagatgctgggggaaggtgcttgggagagtttctgaaaggcggcctccgcatgtcaggatgaagctggaaggccacagctctgctgatgaccaacatagtcagggctggaatatgatggctggcatgtgttaagggctcattgaggaccacacccttcacctgcatcatctcgctcaacccttttgcagagggaggtatttttccttccacttttacccatgaggaagtggaggcccaggaaagtgagagaggtggctcagcttccaccactggccagcggtgtggcctggaatgcaggccccagcaactttgcagcctcctgccttaagggagtgggctggaccccaaatgaatcagtcccaggccgggcgcggtggctcacgcctgtaatctcagcactttgggaggccaaggtgggtggatcacaaggttaggagatcaagactatcctggctaacatggtgaaacctcatctctactaaaaatacaaaaattagccgggtgtggtggcgtgcgcttgtaatcccagctacttgggaggctgaggcaggagaatcgcttgaacccaggaggcggaggttgcagtgagctgagatcgcgctgctgcactccagcctgggcgacagagcaagactccacctaaaaaaaaaaaaaatttagtcccaaatgcctctcagctcctgccctatcccagacatcttaaagctcagagctggtctgctgcctatttcccagcctaggtgctcagtggaagttgggcgcctccagttattttctgaggttgaaaaagcttaactaaaatataactttgcaggccaggcacagtggctcatgcttgtaatcccaacattttgggaggctgaggtgggaggattgctcgagcccaggagttcaagaccaacctaggcaacatagtgagacccccatctctacaaaaaataaaaataacaattagccaggcacggtggctcatgcctgtgatcccagctactaaggaggccacagcaggaggatttcttgaggccaaaagtttgagaccagcctgggtaacatagtgagaccccatctctacaaaaaataaaaaaacaacaacaaaaaaggaaagagtagccaggtgtggtggtgcacatggggtcagagtcccagctgctcaggaggctgaggccaggggttcgaggctgcagtgcgccatgatggtgccactgcactgcagcctgggtgacagggtgagaccctgactctaatgcatatttgtatgtgagtagaagttttcccaagatgagcctgcagaacgtgtttccgctgggccgctggctggtgtgctgagctgtcactcccattggtcagcagctcttgctcatccgcagaggggcctgggacagaagctgatgtgcttcagtcgacctgatcttgcagaacacgggctccagggaaagtgaggaaagagctcctcagcccgtaccaagggccctagcctggtcaccgtcccctcctccagtgaagaagctgggcacctgggaggcgcatgagtgtggggtgccataaccttgcagcactgaggtgagctgagttcaccaaagctcctcgcccacagggcagggctggagctttgggggtcaaggacaagctctgtctgcaaatctagacagttcctgcatctcacggtggtggaatcacgcgggtccgagaaggctccagtaaccaccctcgcatgtttgcaaggctgtctgggaaaacatggcaggtgcggttaagcggcttttgtgggattaagcaaaatgaaatgtgggtgaaaggagatgcccaggcctggagcgaaatcactttcttccctctccctagataactgtttaaagtgggtcatatccccagaaagtttctgtgttactaaaatagttgctcagtgtattataagaatatcacttgcagtgggcgctgtggatgaaaggaagtgagggagcccaggggacagcggatgagagctggagactcgggtttgcccacagagttattttaaccataaacacagcaggccgaggctgggcgaagcaaaataagacagaaaccaaacatttccagaataatagcgccgctctacaaccccacaaaataagacagaagccaaatactcccagaaaaacagcgctgctccacaacccccacaaaatacgacagacaccaaacatccttagaacagcagcactgctccacgacccccacaaaataagacagaaaccaaacatttccagaataatagcgccgctctacaaccccacaaaataagacagaagccaaatactcccagaaaaacagcgctgctccacaacccccacaaaatacgacagacaccaaacatccttagaacagcagcactgctccacgacccccacaaaataagacagaaaccaaacatttccagaataatagcgccgctctacaaccccacaaaataagacagaagccaaataactcccagaaaaacagcactgctccacaacccccacaaaatacgacagacaccaaacatccttagaacagcagcactgctccacgacccccacaaaataagacaaaaaccaaatattccccaagcaacagtgccgcgccacatcacccccaaaacaaaaccaacctctgctgtgcccagaggaagtttcattgtttgtgacctgtcacctggccctccctcagttcactcacctccccctctctcctgggaccgacaggctgccagagcttgccatgtgagcctcggctgtccgtctgctgagacatcttcccctctggggccctgggcagtttggttctatgggagaaatgcatgttagaaatagtttcatattaagaggaagcaaaggctgacacagggccttggtggctgcatctggcagggctgtctgcagagcggtgtggcgttcccagggccccaaggtgtggtgtgcgtccagctcagctgcttcctctttcagggttgacgccatggtggacctgctggacctggacccactgaagaggtcgggctccatggagcagaggttggcctccctggaggagcaggtgggtccgaggtcggggcctccgtcaggaggtgccactgctgggcctggtgggcggctctgccatgtggtggcaccaagaaggagggctctgaggagtgatggtgaggaggaggccggaacgttggggcagccattcccagctggaagaggcaccctgtgtgtcctccagaaaaccccgcccaagggtttctgtgactgagttccttctgtgtgcactgaggcctccacggccgggctgtgctcctcgctgctcccaggaaacagagtgcttctcccctcccggcctccagggaggctgtgggactctgtgcctgagccctggagaggccgcaagaccgaggtggggaggacttagagacggcctctcagggtctgctcccaccaccccatcaacgtccaccagctgggccgggctgtgctgtccaacaacagcacctgcggccacggcagcccctgcgggcagtgctgagccctgtggatggctcagccaccctgtgctgctgctcccagccttgctctgtggggcagggctgggacctgtgctgctggggcatccaccatccaccagtcctgcccgttgcacccaggggtctgcccaggccgccctctacccctgtcttggccatgctgggacccctgacagggtgcccagcactgagccacacgagtgagacatgtcccactgtcccctgtgggaggcgcatcagcctctggggaggctcctcctgggaggtgcaggaaccctggaagcctctggctttggcggcctgtgacctctccctgtggtgcagaattgcctgactgtgccttcatgctggctccatcctctggcttgtccagtgcagtgacagtcccactgttgtgtctcttggggaggctgcaccatcagatgtgtgacttggcagcccccggggggagccgggtgggcctggggcagcgttctggctggcttggtggctgcctggggaggacgtggtgtctcactttcaaagggcgcaggggctgagtgacaggggtggggctcctggctgggggagtgaagtctcggtgggcagtggggtgtgtaccatgcgtgtgggtggcaggtgctcactgtgtctcgggccatgccttccaggtggcccagacagcccaagccctgcactggatcgtgaggacgctgcgggccagcggcttcagctcggaggcggacgtccccactctgggtgagtgggtggccaggccagcagctggtctccagccgcctgtttcttttgggtctggggtcagttgggaggagaggcagctgggggtggggggctctgtccaggaggaaggcactggctgcagcctgttccaggcagggccagcgccctcaggaactcagcccacccaccgacgctggcgccgaggccccgcccaatccctgacctgacctggttcctggacgtccacggggaggcctggcctgctgtgccctgagctccccacataccgcactgcagagtgggggtgcgaggcgggcggctgcagactgtgtctgaacctggtcacgtaggctgagtgacgagaagcaaagtctgttttcctaaattcgcagccggctatgaaatgcacatcagtagccttcctcgggctgctgagtttcgccggccctcaaggagcatatttgccctcgtaaccgcactgcgagttcagctcattgccgagggccctgactgccgctgcacaaagaggcaggtgccggcggggacgctgcctgagctcccgtggctgtcctccctgggggccctgcccacttcagagctggtgttcgacctgcatggccatttgggctcggggaggtggaggagcccagatgttttggcggaaggaccacagaggaagtccttgtcctgcgggcgggcacctgagcccgggctccgccttgcgtcacgtcttcctgactgtccccagcctcccagaaggccgcggaggagccggatgctgagccgggaggcaggaagaagacggaggagccgggcgacagctaccacgtgaatgcccggcacctcctctaccccaactgccctgtcacgcgcttccccgtgcccaacgagaaggtgccctgggaggtgagcgcctgcccaagcccaaccaggcggagtggccgggcccctggggaggggagggcggccctgtccccatccatctggtattaatcctggctcccagccactgcagccacagggggatctgtgcgtctggcagcccctgtttgacatttgaggaaaccgaggcacagagaagtcaagtcacaggggcctcacagctggaggtggtggaggggcctgaggggggcacactgatccccacagagctcgaggcttaggctcctcccatgaccatcccagggcccagccccccggccccattcccccaggtcatgccctggtcctagaccccacccaccccggtgaatggctctggcccctttccaggtgccaggcatggaagagagacagagacacagagacagagagatggctaatggcccctgggagacccccgccctcctggtgcagggcttctctctggcctatccagaacattccaggctgctgcttccgctgcctccccttggtctctaccacatagaatcctccttgcctctagggtccagcttagccccctgccccactctgggaagacccccaaggcccccaagtcacggccacctgcccttcagctggccccagggtgggggtccctgatcccagcccccggccctgcccagcccccagctctgcctggcacccggatctgcccagcttggagcttctgccctgcatgttgggatgttggggtcgggttcagacccagctgagcagccctttcaccctggtgcctggcccagctttgcagtgggggtaaaaatctgagggaaaactccctgttttgcgacagacggagttcctgatctatgacccacccttttacacggcagagaggaaggacgcggccgccatggaccccatgggagagtgagtatgagccgctgtccgtgctcccagctggccccaaacccagggcctcctaggggctcccttgagaatcccagtcagagcccagcccggggaggtccaggtgagcaggaggggcccgtgggggcctgaaggggcccagctcctactgttgtgtacacccagcctgcagctactcggctgggcccttggtgggggggtgatccctctgcctgtctgctctgtcccacctgcaacacgggcacacagacacgccttctcctctgctcccagcaccctggagccactgtccacgatccagtacaacgtggtggatggcctgagggaccgccggagcttccacgggccgtacacagtgcaggccgggttgcccctgtgagtgtgccccctgcgggccccgccccgtcagcctttggggtttgcctggggggcaggtttcctctctgggcaaaggaagcatttttctcataaaacaaaatcaaaaaaagcacgtgagccaccgaaaggaagaaaacatcaactcactgcatctccgtagcccccaggactgggcttgggggcgtgggacttgccccctggcctcgggcaggccctgccccatggtccctgccgtaatctggggacgtggatttgtctgtgtacgtggggatggctgtgctgggagaggacgatgcctcagaggatgggcaggggctgtgcggcagggaggggacacggagatgggcactggcaggcttacctggccgggaaggtggcctcgcctggcatcctgttccccacaggatcggcgctgcacccatcacacaggtgaggaaacccaaaataaaggtgtcaagtgtcctgtgagcacctacaagtgccctggaaggaaggagcctgggagtcttggaccctgccatgaggaggaggtggaggaggggccaccagaacctgggactggggggttgccgggatgtggggcatgaaccatggagcagaggaaccaaagggtctgaaggacggggggactgcgtggcaggcctttgcagaatgctctggaacagggtgtgggctcctctgcctggagccggaggttgagtaaggaggtggtaggaggcgatggggcctgagagcagaggtcctggccaggtggctgcagctgcaggcggcccgctctggtgttgggggtatgtgggacgggcaagggcgggtgtttagggaggtgcatccggtggctatgggaagctgacgaggagagcagcaggtgcctggcatgggcaacaaggcgtgagcacctgctctcacgggtggctgccacacaggcaggtgtgtcaggacttggcaggacgtggtgtccatgcgggctttagtagtgcagaagagcactttctgtatgcaccatgcttctgttgtggacttgcgaatcatattttcattatatttccttaggtgtgttctctttctatgaaattataaagacacaccttcctatattcatttgatacattttaaaattagtttttttcactgagactttaatacagctgaaggctgattgtataaggtgtgaggaggggcctgatttattttgtgaattcacagagaaagtgagctgcctgacttcatttcctgctaagatctggcccctcccctgaggtgtggctcctccctgaggtgtggctcctccccttaggtgtggctcctccccttaggtgtggctcctccccttaggtctggcccctcccctgacgtgtggctcctccctgaggtgtggctcctcccctgaggtgtggctcctccctgaggtgtggctcctccctgaggtgtgactcctccccttaggtgtggctcctccctgaggtgtgactcctccccttaggtgtggctcctccccttaggtctggcccctcccctgaggtgtggctcctccctgaggtgtggctcctccccttaggtctggctcctccctgaggtgtggctcctcccctgagatgtggctcctccctgaggtgtggctcctccccttaggtgtggctcttccctgaggtgtggctcctccctgaggtgtggctccttccctgaggtctggctcctccctgaggtgtggctcctccccttacgtctggctcctcccctgaggtgtggctcctctttcaaagctctgtatgcctctgtcccagtcatctcatagcagatcatgccactatttgccacagcgttgcagtaatcctgactctgggatagcatgtctttaaacctgccttttctagtcttgagcctttagcttttttgtgagtttaaaagccagtttttctagctccatgacaaatccattgataagaattgtattaaatttatagaaaaatttgagacaatggacacttttatgataatgagtcttctatgactgtatttgtcaacatttatttatgtcttctctttgtccttccctaaagttttataattttgttcataaagatcttacatttttaaataatatttattcctcaggtatttgataacttttgttatttggggtaattataacatttttttctttttcttttttttttttttttttttttttttgagatggaatttcacttttgttgcccaggctggagtgcaatggggtgatcttggctcactacaacctctgcctcctgggttcaagcaattctcctgcctcagcctcctgagtagttggaattacaggcatccaccaccatgcccagctaattttgtatttttagtagagatggggtttcaccatgttggccaggctggtcttgaattcctgacctcaggtgatccactcgcctcagcctcccagagtgctgggattacagacatgagccaccatgcctggtgtataacatttttttatattttcaatttttaaaaatatatataggggcattattaattttgtttgctgactttgtatctaacaactttattaaaccttctcgttaattatataaatgtgtttgtagattttctatgtaaataatatatattctgcaaataacaatattgtctttctccttacaataatcatgcctcattcctttttcttgccttattgtgctgggtaaattcttcagtgtaatttagaatattggtaatattaacaggcttccttgtttctgacttaatggaaatgctatcaacatttcaccattaagtatggtatttactgaagaaatttataaataccttttattggattaggaatgtttctatctagtcccaatttgtcaggggctgaatgctactaaatggtttttctgccattgattgagatagttataagatgtttcccctttagccaattagtgtgtgaattatttttatagctcctttagtgttgagccatccttgcattcctggaataaactcttctgttatatttaacgtactgctggagttaatttactaacattttacttaagattttaaaaaatctgtgttcaaaagtggaatttgcctataatttatatttcttgtactgtcttactttggttttggtatgaggttataccagtctcaatgaatgagctggtcagctttccttcttttctcttctttacaaagaagagaatgtttgtatgaggtggagataattatttgtttcttaaagtctgataatacttagctatataactgttagctctaacatattttgagcaagtggatttctttttttttttttttttttttttgagacggagtctcgctctgtcgcccaggccagactgcggactgcagtggcgcaatctcggctcactgcaagctccgcttcccgggttcacgccattctcctgcctcagcctcccgagtagctgggactacaggcgcccgccaccgcgcccggctaattttttgtatttttagtagagacggggtttcaccttgttagccaggatggtctcgatcttctgacctcatgatccacccgcctcggcctcccaaagtgctgggattacaggcgtgagccaccgcgcccggccgagcaagtggatttctaactactttatcttccataatgatttttcgaatcttatttcctgtttcttcttgggtcctttttagtaattgtaaattttctggaaaattataatttcatctaacttttgaaatgtattgtgtcacagatgtccataatattcttttatgatttaaaaaataatataaatatatagtaatttctcttttgagcattgatatttattatgtatttctcttctttttttttttgattattcttgccagtggcttaattttataatcttttcaaaaaactaacttttggatttgttgattatcttaatttttcgatctcatccatttttgcttttattgttatctttccttcctttctacttcttatggatttgctcttgatttgtgtgttagagctcatttttattcaactttcctggttttctaataagggtacctaagactgtaaattctctctaagacctggtaggctgtaacccttaaattttgatgtgtagggattttattttttactttatgaatttcattataatcttcattttacacttttgttttgctcttttttttttttctttttgtggagaatgaggtcttgctctattgcccaggcagatcttaagctcctgggctcaagctatcctcctgcctctgcctcctcaagtgctgggattacagatgtgagccaccacgcccagcatagtcttcatttgattgtttagtgatgtacttttagctttttttatcttgagatggagtcttgctctgtaccccaggatggagtgcagtggtgcgatcttggctcactgcaacctccgcctactgggtcccagttcaagcaattctcctacctcagcctcccaagtcactggaattacaggcacgcaccaccatgccagctaattccttttgtatttttagtagagatggggtttcaccatgatggtcagcctggtcttgaactcctgacctcgtgatccgcccgccttggcctcccaatgtgctaggattacgggcgtgagccactatgcctggtcatgtgcttatagtttttaagccattctttgttatcaccttctagttttattgcatttttgttggagcgggattggcaacacgctgattcttgaaattgaaatgtcctccgtggcccgtctctaccctgggttgttgcagctgtttggctgtaaccctaaactaacacctaacccctaaccttaaccctaaccctaatcctaacccctaaccttaaccctaaccctcttggcccattcacaacagcagcctgtgtgagcttgtctgactcaagtcattcacacactcagatgccctttctggtataggagtgactgtccccacgtctgtctggggccagccccctcactgtattagttttctatggctgttgtaactaagtaccacaaactggggggcttaacagaaatggattatctcacagttctgagggccaggagtctgaaatcaaggaccacactccctctgagggcttgaggggagacctcttcctgcctctccagctcctggtgttcctggcagcccttcgtgttccttggcttgtgatctctgcctccctagccacatggcctctccctgcacgtgtctgtgtctcttctgttcttaggattataaatcgtactgggtttagggccaaccctattccagtgtagcttcatcttaactaattacacctgcagacactatttctgaacaaggccagattctgaggttctgggaaggacatacatttgtgggcattgttcaccccagtgcatctttgtgctagacccatctcccattgcctttcaaggacctcatcccgggaatgtcctgctcctcctgcacccgggtcctcctgccctcttgcattgctcctgccaacataaactaaacaagcccctgcccgcaagtcccttcctctttcgaatccactccacttgggctttgcttgccccctctttctgagatggattgaggtcaggtcagcaaagattctgccttgttcaacccataggccagctctccacccctcaacccacctgcatttctggagctgagtggatgagtgaatgaacgtgtgattgctgtagccagactgtcgctgtttttgcgctttggggttgtgtgcgtaggtttatggacgggcctatgccttgatgtcgtgatggaactaccgggcacgtggcagggagatgaggggttgagaaccatatggacgagatcatgaccgggggatcagagatcagggcacagtgagagcagctgaagactcaggtgtggggtgggggctgcggtgggaggagggcagcatggtggtccgaagcccctgctgcccggcccgctcaggctgactgagaagcaagggtgcagagtgtttgtttccctcctggcagaagcgagcgtgcatgtggtaggagctggcaggcccctaacctccctcctggctctgccactggccgactagggatggggacagtgagatgacagcagggccctggggcccagagcttcctgtgggggtggactcatgccaggcagagcgtgtggcctcctctgtgagcttcttgaccaatgcactgcactcagcacgaacagcagttacagggagacgaggcagccttgctcccagcagcacgacctctgccttcctctccttctggagctcagtgcagctctgcccagtgccgaatttgtccgtggccttggttctgggttctgcccgctcagtggcgtgagtgcaggaaggagaatggtggctggcaagggcggggtggacgggagtgagagacgggcttggggttgaggggaggcagcagtgaccctcgcaggaaccctgactgagccccggccttcgagctgaggtccccaagccttgctgcatgtgttgccagctctgtagctgggtggggccggggctctggtttctgagcagcttctggggaggctgcctgggccccaccgtgcaaggccccccggccacagaggagaccgcagagtgagctgggagggctgtctgagaggcctggccaggtgggccctacacactgggcatgttctggtgcggactctgatcgctgtgggctcgggcaggtctgcgcagaggtgtgacgagagctgggacccctgacagctgggcgggaacagggtggctgctgaggggtaacagagaggaggggctgggtggaggcagggaggccagctggaggctgccccgccaggcagggtcagggacggtagcgcaggcctggctggtggccgccggtgctagaggtggtcagctgtcctggggcagccacggtcagctgtcctggagcagccacgcactgccgcgcagactcaggaggatggagtctaggctgtggggagaggaggccatgaggggtgggtcagaggctgcagctctgatggggtctggaggtcagagtggaatggtggaggaacgataccactgtccccactgtggcatggatggtggtggggactgtggtggggacggtggcggggacgctggcggggactgtggcagagacgctggcagggatggtgacggagactgtggcgaggactgtggcagggacgctggcagggatggtgacggggactgtggcggggacactggtgttgggaacgctggtggcggggatggtggcggggacggtggcagggatgctgtcggggactatggcggggatgctgctggggaccttctgtagacgtggatgccgcccccaccgcacgatagcggcagtgcatttcttccttctgttttagtggtacattcacaggaaatcgcccgtttctagaacttgctgtttcatataggacctggtggtgtcagggagaccagcctggccccatgggaagcgtctgtggctcctgctgcccgtggttagcacactctgctgggggtctgtgtggcctatcatctgtggccacacggacgcagggcctctgggtgtctggcctggttcccacactgcccctcggaaggctgccaggatggaggccatgctctcgcgtgctggggcctttggatgcaaagtgctggcccgagcagtcggccagttccatgctccgtggggagaaggtggccactttagcccctcgctggcctgcagtggccggacttctgctcccagggagacccttcccccaccaggtgaccccgagttaacccagagccttggtctcactccttgggggtcccaaagggatcctactccctaggccagagcaggtctctaaagaagcctgcatgctgtcccgctgtgcgccggctcctgacgcccgctgtcccctctcagtccccctccctgccctgtcctgctcccccattggtggacggtggactgactcaacccctctgcatcccaggaaccccatgggccgcacaggactgcgtgggcgcgggagcctcagctgcttcggacccaaccacacgctgtaccccatggtcacgcggtgagttcatgtgtgccgggcaccagcacctcagcaaggcggtcaccccaccttcacaaggggcggctgccattgcccagtgctcaggggccgggagggcggctttgatgcttggcacttggtgcctactggggggatgcgggaggcgtctgtggataaacgtgaatatgcccgaaatggggcaggaatgtccatgctgcccatcctggaggaagatcccaggacccatcccctctcccggggctgccttcactttcctgccggtccctgcccattagagggcaccctccacggggacacagccccacactcacccctaagtctcactcctccattcccatccacggggacacagccccacactgacccctcagactcactctccacacccatccacggggacacagtcccacactcacccctcagacccactctccacacccatccacggggacagagccccacactcacccctcagactcactttccacacccatccacggggacacagccccacactcacccctcagactcactctccacacccatccatggggacacagccccacactcacccctcagactcactctccacacccatccacggggacacagccccacactcacccctcagactcactctccactcctatccacggggacacagccccacactctctcctcagactcactcctccccacccatccacagggacacagccccacactcacccctcagactcactctctactcccatccacagggacacagccccacactcaccccctcagaccctctccatactcatccagagggacacagccccacactcaacccccaccacaggctcattcctccacacccattcacacacagggacacagctccacactcaccccctcaggctcactcctctgcactccagcagctggcccactgctctcacccaaggcacgggccgccttctgtgcaggtgcagacgcctgcgtccctgaggaagctgccgggggctcttgctgcccccattgggcaggaatgggattctggggcccaggcccagctgctgtgccctgtgctctctggggcctctgcctccacagctgggacctccccccagcggaggggcctttggcctcagggtcctcttgctgcccagccactctcacccagtggcttctctggccgtgcagacatggccctggggtgcgagtcactctctgctccccagtcctttggcctctccttggcctgcccaggtggcactcggcaccccacgtcacccccacgtcacccccgggctgcactctgcaccccatgtgacccccaggtggcacttggcaccccacgtcacccccatgtcacccccatgtcaaccctgggctgcactcagcaccccatgtcacccccacatcacccccaggtggccctcggcaccccacatcacccccaggctgcactcagcatcccacgtcacccccgggaggcactcagcaccccacatcacctcactggattcccactggcattttctaagagtggtcaaactgcaaagctgggtcaaagggcaggtacctctctaaggattttaatgtttaaaaaattctccatgaaggctgggtctctttctagttctaccagctatgatggaagtgaagaaggacgtcccctaagtggttactatctcagtcttttccctggggatgaagaacttgaaaaagaacacggtttgagcctgcagtgggcctgacactgccccgccccaggcagggccagccccgccgcggcgcaggggagggtggaggccgcagcgggtcctgggcagccatggccgctctctccgcaggtggaggcggaacgaggatggagccatctgcaggaagagcataaagaagatgctggaagtgctggtggtgaagctccctctctccgagcactgggccctgcctggggtaaggctgccgcgtgtgggacctctgtccactgggctgtctgtgggtcactcgtccattcatccattctgcccacggactggacaccagccccctgcagccccctgcagcccctgggcagggagggttcgagaccccgcctgttttgtctgtagaagacactcctcctcccttttcctcatgttgcagttaggaaaacccaggatcagaggatcttttggtgcataaacactaacggggcacctactgtgtcccaggcatgggctgggctgcggctggaggccacctgggctccccttgtggagttcagggtgttgggggcagaggtagctcttctcccgtgtctcagacaccaaccagctcctgaccttcagggccaggtgctgagccataaatataggacggtgtcatccaggggtaggggcaggtacaggagtaggggcaggggcagcgacaggggtaggtagggcccagggttgtgcacaggcccctcagctcaggggctggttgtggggctgaggctggagcgcaccccagcatcttgtggggaggggtgcacacaatcaggacagatggcctgggcctttcctgttcaagtgcctccaacagctcctgtttcctcccaggccagcctggcctccgcagccctccagcccgctcactgcaggggatggaagaggctggtcctgccaggaggtctgagtcctgccaggcctggccgtggcgcatggcctctggggtacagcctgccccgcagggcctctcctctgcacctgatccggggagtctgtgacttacaacaactcagcaagaagctgttgcatttctctgaccccgagctcacggcctggtggctgcctctgctgctgtgggagtgtgtgtgccaccacggtgtgcagggcagcagtgccacaagggcctctgggcaggaacggggactccggagcccaggcccagctgctgggtcccagtgctttgggggcctgtctccacagctggaaccacccccgcagcagagggggcctttggccttggggtccccttgctgccctgctgcgctcacccagtagcttctctgcctgtgcacacctggccctggaacacgagtcaccctccgctctctggcactttggcctctccatgcggggtgcgtggagttgggtttgggggtcccactcactggcatccctgtcagctcaggctggtcactgagaggggcactctgaggggcctcctgggttcctggctctgtagggcacgcacgcttgagggtgggagtgtcatggggctgaggtgggaccgtcttgacgtggcctgcaaagtcttcatgagaaacccacgggtgtttcagtgggactttgaatgacaaatagggtgggaaagatgggtgtggggaggaggaggtgcaggccggagctgggtccctgagtcaggtggcgctcgggagcgtctgggagcccagccagccgcagcacaggccggggtgggactgggagagacgggaatgcaaacagggaacccgccgtggcagcctgctgcactgggcgggagctgggaggggcgacgcgggggcaggcgccaggggagcgggaagggggtgccctgtcacccttggggagtctgagctcagggtgggtaccctgggggctgtccctgctcctcagaggttgtgtctgcagcccagtgccccctgctcgggccacggcaggcctcacagatgctgacgtggacggcgggttctgggcaatgtcactgcagcctgagatgccgcctgcctgtggctcccagggctgggccgctgcccacgccgggcaggaggccagtggagacgggtgccagggcagcctgaggtcccgcttcggtgccctgttgacctgcctccgtcctctgtctgtccagggctcccgggagccaggggagatgctacctcggaagctgaagcggatcctccggcaggagcactggccgtcttttgaaaacttgctgaagtgcggcatggaggtattcctggcctgtttgctctgttccacctgtgtgtccccagggctgcaggacaaacacagtgtgatactggggacctgccccagcaccactgggtggcagcggtcccacccagcttcaccaggtgacggtggtcccagcccctgcccccacgttgcacagctcccagaggacccggaagcatagctgtgtgcagggcccctcagacatctcgccctccctctctgttccattttctcctctctaaatcaagggggatgggctgaggacccttgctgccttcgagtgtgacagctgcttggaggcctggtgccgccctcctccccacatccacccttgcctcgagcacagctgcgcccaagggtgctgggaagccagcccctccctcagacctcgccccgactcccaagctctggaggggcccttcccacatgcatgcccagcctggggaccgactgtaccaggactttttatttacttctttagaaacctcgatctttccttagaaagcctccatctccagctctctcacacaaatgcatgcacactttttttttaatttttatttttggaaacaaggtcttattctgtcacccaggctagagtgcagtggtgcgatcttggcttgctgcagcctccacctcccgggctcaagcaatgctcttgccttggcctcccaggcagcaggggctgcagcggtgagacaccacacccgtctaatattttgtatttttagtagagacagggtttggccatgttgcccaggctggtcatgaactgggctcaagcgatctgcccacctcagcctcccaaagtgctgggattacaggtgtgagccactgcgcccagccctttatggacgctctttataaaagcaggctacacgggccgggtgcgctggctcacacctgtaatcccaacactttgggaggctgaggtgggtagatcacttgaggtcaggagttcgagaccagcctggccaacatggtgaaaccccgtctctactaaaaatacaaaaattagccaggcctgatggcgcacacctgtaatctcagctacttgggaggctgaagcagaagaattgcttgaaccaggcggcggaggttgcagtgagccgaggttgcaccactgcgctcaaaaaaaaaaaaaaaaaaaaaaaaagtgatcaatgccatggtgtggagcacttcacaacattgtgcagccaccacctctatccggttccagaacgttccatcaccccagtcacccccagctcctccccagcactcccgcatctgcttcccatctccttggatttgccggttctgggtgtctgttatgagtggactcctacaacaggtggcctttgaaactgtcttccttcactgagcagacgtttccaaggcgtttccaagatctctgcagggcaaggacgtgtctgtccaggatgaagcccgcattgggctgctccgccttgcaggcccaggcaggctggcgggggctggggagagctgggccggggtcctgtgtgtgctggaagctgtgctcagagctgggtcagggtggagggcacgaggtgggccggggcaccgctcaggtgtccctcgctgtcgggcttaccctgccctgcccatccaggtgtacaaaggctacatggatgacccgaggaacacggacaatgcctggatcgagacggtggccgtcagcgtccacttccaggaccagaatgacgtggagctgaacaggctgaactctgtatgtgcctggcctccctggaggcgggagtggggaggcagggacgggtatgggcgtggcctccggggagggggttggcagggatgggggtctggattctggcaggctgaactctgtatgggcgtggcctccggggagagggaaggcggggaccggggtctggattctggacgtgcctcgagggcttccaagggagggacctggccgtgctcctggggcccagggccagaaactggaggctacagggtcagagtcttgcccagaaagtgacaaagggggcaccagggagaggccggggagccacctcaggtggccagagctcacagggctggccaggcgaccatagggccctgtgtagttctgggacctgggtcctccagggaggcctcgaagatggcatccaggggtgaggctggcaaggccccctcagcccccggctgccggcttttagctctttatggggatgtggattcccagtacttggattaatcctgcatgctcctaattcagaactgggatgggaaattccataaataaccccgggctttaaatgcgggctaaatagctcccggcaaagctgcacctgcatcttcttcccctgaaggatcctcagggccttgtgggtgcatctctggtgcacctgacgcaggggtcctgcctcccatttcacagaggagtaaagggagggtgtgcaggccccaagccctcgaaggctgcagtccgtagggctcagctgggcagaggcagggctggcggggagggtcagctgtgcccttgttcttccagaacctgcacgcctgcgactcgggggcctccatccgatggcaggtggtggacaggcgcatcccactctatgcgaaccacaagaccctcctccagaaggcagccgctgagttcggggctcactactgactgtgccctcaggctgggcggctccagtccatagacgttccccccagaaaccagggcttctctctcctgagcctggccaggactcaggctgttcctgggccctgcacatgatggggtttggtggacccagtgcccctcacggctgccgcaagtctgctgcagatgacctcatgaactggaaggggtcaaggtgacccgggaggagagctcaagacagggcacaggctactcagagctgaggggcccctgggacccttggccatcaggcgaggggctgggcctgtgcagctgggcccttggccagagtccactcccttcctggctgtgtcaccccgagcagctcatccaccatggaggtcattggcctgaggcaagttccccggagagtcggggtcccctgtggccccctcaggcctatgtctgtgaggaaggggccctgccactctccccaagagggcctccatgtttcgaggtgcctcaacatggagccttgcctggcctgggctaggggcactgtctgaactcctgactgtcaggataaactccgtgggggtacaggagcccagacaaagcccaggcctgtcaagagacgcagagggcccctgccagggttggccccagggaccctgggacgaggctgcagaagctctccctccctactccctgggagccacgtgctggccatgtggccagggacggcatgagcaggaggcggggacgtgggggccttctggtttggtgtcaacagctcacaggagcgtgaaccatgagggccctcaggaggggaacgtggtaaaacccaagacattaaatctgccatctcaggcctggctggctcttctgtgctttccacaaataaagttcctgacacgtccagggccaggggctgtgtgacggctgcctgaagttctcctcgatcccccggtgagcttcctgcagcctgtggatgtcctgcagcccctcagccctacccccaagtttctcctctgacccatcagctccctgtcttcattttcctaaacctgggctccagcatcgtccccaagcccaccaggccaggatgcaggcatccacatgccctcctccttggcttcccctgcgtggtggtgccaatgtgccctggcacccctgcagaggctccggatggagcctggggctgcctggccactgagcactggccgaggtgatgcccacccttccctggacaggcctctgtcttccacctgacccaaagctctctagccacccccttgtccccaggtatccccctcaccccatcagcgtcaccaaggacacaactgaccccttatgccctgcttagaatcagtcccgtcaccaacttttgtgacggagtcaccttggggtttgataaaaatgtagatcttcaggcccctcttgaagctcagaggcagcagggctgggaggtcctggaagctgcatctgtggtcagcatccgccactcccaaggggctcgcaggtggcgggtttgaaccacaaagcagcctggatgtggcccaccccacccctctccagctccctctcctgctgcaatgcagcctccacgtgcaatgcagcctccacgtgcaatgcagcctccacgtgcaatgcagcctccacgtgcaatgcagcctccatgtgcaatccagcctccaggtgcaatgcagcctccacgtgcaatccagcctccaggtgcaatgcagcctccacgtgcaatgcagcctccacgtgcaatccagcctccatgtgcaatgcagcctccacgtgcaatccagcctccaggtgccacagggaaggcctgtgactcctcggttactggccgtgggtccagacctctgccagggaccatgttgtgctcagtgctcctgtttctagctgcaccatcgggctgagctcccactgtctggggctggtctcggctctgtgtctgcaggatctagaaacacccatgctgaaggtggcacccagggaaggggtgggggctgtgcctgggggtcagaccagagagggacgccaccaaggggatgggcgtctgctctgctcacttgaaacacccatgacacgaacttcgccattggaaccatttcagctgcacagtgcagtggccgtagacactcacacggctgtcccccatcaccaccgtgccccctgctctgcccactcctagaagcgctgctcctccaacccggggctgctgcctactccagcagtgcccccagggggccccgtggctgagctgtctgtgggtgcctgcttgggcccagccacacaccaacagcggctctgtgggaggaagttttgcctccttttgtagagggacctggggtgcggagagggcagagggcttgctcagtcctctcagcagctgctggcaaagccaggcctggacccagctctcctcggctgtgccgtgcagcagccacagaggtcagcggctcttcgaaccaaatgggaaaccaggacatgcctggtggaccacggactttttgcgagtcaggcatgaggccttctgatcattcactcatcccttcctacctggttgctgagcctgtctgtgccctggggatggggatttgaggggtgcagtgatgaataaaacccatccctgcccgagggcctcacaatcctggatgaagtccactcaggaccgcaggagccggaccgggtcggaggccggggaagagcaggcattccagcggaggagtcagctggcttctccagtgaggcggctgagagtgaagactccaagggcagaacaaacagcaaatgggagacaggcaggggcacgttccacagcacagacgtgggccagcccgctgggggcagtgtggagcaggcagtgccctcatccaggacctcagcattgaaggaagcgagggttctgtgaaccgtggtctcttagaggtcactgccctctgagggaagagctcacagtgagcaagatctgggtgggggctggcgggagggtgagcggaagctggctgaatgcagacacgatggccagagctccagcagccttctggggccatgaggatgaggcacccgccgggtgtggtggagtgggaggtgacaggctctttagggccccgccctccagagtcctttcttatgtgagaagggaatactgtgtgttaaagccactgttattttgggtgccaaccaattttaacctaaaattggttaaatatgcagccaaccaattttcatggaatcactagacaacccagaaccatcaaatgtttgaggaaaaccaatcactaccaaaaaggggcccccaaagtcagcaggtatcaaggaagcagagcaaacaacaccctcgagaaaagggcagtacgtcttcacaggtttatttatccatagagaagatacagccttaaaaacggaactgaaaatataaatatgaaaaatgtgacatccaaaaaaaattaaaaagtgatggggtgaataacaggaagaaaaggctgaagaacgaacttgtgcctggaacacacagtcaaggaattctccactttgtgatgtcagctttcctcaaatatctggggatgctttattgcttcctttgctttgtacttgaaaatgcccaagtttttttgtacacagcagagcgagatagagggaaagtatgaaaaaaaaaaaaaaggaaatggaggacgaagccagacattccaacatctgcacactgagagtttcagaagaagaacaggattgatgggagggaaataatgcacacctgggccctgtgggccccgcgacggaagctctgcctgctcctcacggtttctcccggcgcccagagcagcggctgttacagaatcggctctccgtgaatgagacacgagatatgtcttcatcttcataaaattttagaacaatgagggcaaaaggaaagatttaaaaaccactatgggctgggtgcgatggctcatgcttgtaatctcagcactttgggaggccgaggtgcgtggatcacctgaagtcaggagttcgggaccagcctgaccaacatggtgaaaccccgtctctactaaaaatacaaaaattagccaggcgtggtggtgcatgcctgtaatcccagctactcaggaggctgaggcaggagaatcgcttgaacccaggaggcggaggttgcagtgagccgagatcacgccattgcactctagcctgggagacaagagggaaactccatctcaaaaaaaaaacaaaacaaaacaccaacatgataaaaaaccaaaacaagaaaacccatccccaggcttccccacagcaatgggtgagagaagagggtgtcccagagttcccaggtgactggctttttgtctagagtcacagacccggccacgcaggccttcaggtggcagcgtccccaggtgactggctttgtgtctacagtcacagacccggccacgcaggccttcaggtggcagcgtccccaggtgactggctttgtgtctagactcacagacccggccacacccagtgacaaaatgtgaggatgcagaaaatgtcacccatgcatccttcctgaacgagtttctcaaaggtgaattacagaaaacaaaacaaaatgaaagagaacaaagcacagagcactgcaggctgcccaggctgttgtagcaaaatgccacaggccggctggtcaaaacctagaagcgattcttctcgctgttctggaggctggaagtccacgatcaaggtgctggcaaattcagtttctggggagcgctgtcctaggtggccatggttaacaatgctgtactggatgctggacatgggctgagaggatagatcttaagtgttctcaacacacacaaagaaaataaaagaagctggtgcggtggctcatgcctgtaatcccagcactttgggaggccgacggtgggtggatcacttgaggccaggagttcaagaccagtctgggcaacatggcgaaaccccatctctactaaaaatacaaaaaaaaaaaaaaacaaaaaaaactagctggacatggtggcacgtgcccatagtcccagctactggggaggctgaggtggcaagattgattgaacctgggaagcagaggctgcagtgagccaagatttcaccacggcagtccaggctgggcgacaaaaaaaaaaaaaaaaagaaaatattttaggttggtgcaaaaataattgcttctaattgcaaacaccgcagttactcttttcaccaacttggtagtcactgtgaggtgtgagcatgtgaaatagcttgactgcagtgatcattcacagcgtgtatcagaacatcaagtcatacaccttaactatacacaattcctatttgtgaattatatctcagtaaagttgaaacaattttatagaaatttaataatagcctagaattaaacttccagacggcctcagcgggggtggcagaggagacttgtgaaggcagctgaagtgcagtggcttccctgtcttgctctggaggaagaatcagacgctggccacacatgagtgctggggaaacgtgggcttaaaaatgcaggaagtaaacctcagggcatcactagaaggatagaaatagaggaatgactttaaaccactggaggaataaaatgaaacaacaaaatcaaggaaagaaaaaatatcactaaagaatggttaatatgaaccaaaatggcaggaaacagtcaaaccgtaacagtaataaccacgcatgtaagtggcgagtctcatattgggataaagacataacacaactagttcctgctattttccatccacaaaagactcacccgaaactagagggacgcataaccgctgaaaacggggacgtctacaccaggcaaatgctctcagaaagcaggacgtggaaacggtcatcacagaccaacagaacggaaggctaagtttgtccttttaaggaacaaagaggaaagtgtaattggataaaagtacaaatgcattaggaagatactatgatcatggtctattatgtaacatggatattataatattataatatataaggcaaaaactatatataaatatataaggcaaaattcttaaatttataaggcaaaatggaaattcaagaagaaactggcaaagtcacagccattgctgaagtctttgcagatttctctcagaaattaaagcaatcaagaagcacaaggaagccaggcgtcatggctcacacctacaatcccagcacttcgggaggctgaggccggtggctcacttggggtcaggagtttaagaccagcctggccaacatggcaaaagcccatctctactaagaacacaaaaattacccctgcatggtagtgcgtgtctgtaatcccagctactcaggaggctgaggcaggagaatcacttgaacctgggaggcggaggttgcagtgagctgagctcatgccactgcacactccagcctgggaaacagaacgtgactctgtctcaaaaaaaaaaaaaaaaaaaaaagcacaaggagaagagggcagaactggaatgtaggcagtggagattgcggttgccctgtgggcatgtgtacatgcgtgtgtatacctacagatatggatgtctgtgtgcctgtctgcatttatatgtacacgtatcttgatggattatggattattacatattgtgcatataactcgtgtaatatgcatgaacacacatgaacgatacgtgagcaaacactatggatccatatagtgtgtgattctgcacctgctctgctgcaaacaggtcctgaggagacacttcatcttcagacacatctgcatgtgcagacggaacatgaacagtctcgtagagagggggccccagcaagtttccaaagcacccccaccctgctggaaacactctccagccacaacctcaggagagtcatgctaggacgcggggggcgtgccgtgagaggacagcaggcgtgagtggatctccaggcaccctcggaccctaagcgcccagccctggccagctcagcaatggcactgtcggccggccagcgggccccactgggaatgcagccctccttgccctttgccctctgtgaggggcttctgtcctcaccatcagattgtgacaggaggcctcacctccttctgtttcccaggctgggtgatcatggggagggcagggccactgggagagtggaggctgtcctgcgactcagccacagggatttgggggaaggaagtgaggactttgagctgggcatgctgtcctccctaacaaagcagggattctctccggagagccagaggggctaaagcagcttcccccagaacccccctcacattgcctccagctgggacgccctgcaggtccagtgggggagaaatgagacatgagagagaacgagagggtgtgtgccacccagcaggcgcgtctctctgagagaatgagagggtgcaggccacccagtgggtgcctctctctggcgtggctggagggctttcaaaggaacattcataaccttaaatgcacttgtttggaaataaaaagactgaaatagatggtctaagtttctgactcaagaggctaaaaaaatagctacaaaataaatccagaggtgaagatgaagacaatgtcggattttaatgaaataggaaaaaataaagaactggtgtgataaatatattcaaaaaccagttcttggaagatatcaacaaaaacgacaaagcttagacgactcagagcaagggaaagccagagatcggggtgggtgtggcgtgcaggagagcccacaacaagggggggttccagaatccaagggaggaccccgggaaatgggacaggctgggagccaggggcgaggaggtggctcaggtggctagggggcctttggggaaggatggcctggctgcacagaccgtgctcgctggcccaggagggaacataaccggtccagattttcaagattgacagagaaatccaggaattcagggagcttaggggaaggctcggtctggccaaagccactgaggaccaattggctgaaaggcaattcatgagggcggacgccctggagagtgtggctgctccagcccagccctcgtggactcctcttggcagccctggccctcaccacggtgctgcccctgccctgcctgtgagatggccgggggctctgtctgagggtccccacgctgagtgaggggcaggggctgggtcaggagggacgagtgtggaggcagggcagcagagggccccggagggcagcagggtggtcagcctgcacccagcggctggccgtggcagtggggcagggctcatccgaggccgctctgtctctctgagtgtggggtgggcaaccccggctccttcacccaagatgttttattcatttgcctgatggcatcccagccccgtggaggctgcaagtgcagctcctccacgccagtccccagcgagacgcactcagacctctcctggccagatgccctcgcggctgggagagtgattaaccagctggagcagctgcattttacccccagaccacaaggctggatcctgggcagataagggagtgagatgctcagccctcaactcaatcacagccatgagggaggccacagcgctcagaccagggaggcaggaggaggcttctggtgtttttgagagcacaggctgtgtgcagggcccttggagacggctgacgtcttcaccaaatggggcaggccacacacgcagaacccaggcgacccaaagaaggcactcaccacgtggcttcaggcaagtgcccctgactcaacaatcggtcaatcagtgcatacactgtgaacaccgggaagagtctgtgaccggcgagcacgccgcacatctgccttgtcttgacggtggcatcacccacacttagtcatgcacacacctcttaggcgtgagcagctgatgggttactgatgtcagcaaccagcacccagtcatctccagcccccagagccctggagcccctgcattgttgtccccatgcttctgacctcctcaccccccacgagtctcctctgctcttgaacctccccagtcggaacctggccaggtgtcctttgcatgcctggcctccttcactcttggtaacgtctgcggattcattcctgtctacgctgcagtgttcagtggcaactgcatgaattcactgaaaatatactgtaacgtttgggtttggctgtggcatctcttccacttttaacataccaacttcacagctcacattattttaatccctttaaaagataattgatttaaagcaaaaatcataacaatgtgttgtggggtttatgacacacgagaaggtgtgatggtgatggtgtagggtccaggtgagggtgggggcaccccgctgtggggatcttacagtgtgcctgaccggctggcacaggagaagccgggacaggagaagccggaggtaggtcactctccaccctggggcagccactgacagcagagtcgctgcggaggggccaggcggggaacacacacggaatcctaaggaaaacctgaggctggaagagaggacagaggaacagggctgtgtggagcggccagggaagaatcagcacacaccgggcccggccagagcgctcgtcacctcaaaacaaggtcatcaaagccagaatcaccccagcaaaacagcgcaagctggaccgctgccctcactcagcttctacagtttctctgctcgtgttctttgtcccttccaggattccacgctgcttttagctgtcacttctcctgtcttctgttgccttccatgagctttttgcctttgagtgcactgaccagtcactttgtatggtgtctctcagtttgggtgtgcccaggatgttctcacgatcggaatgcggagatgcatttttggcaggaatatcgcagaagtgacgtccttctcaggttgttgtatcaaaggtacgtgatgccaatctaccttgccactgatggcccgagctttgtcacatagataaggtggtttctgcactgaaaagctgttattacttttttaggttaataaatatgtcaaagcagatactttgatcctatggaaatctccaatgaagctaatttaagtataagacacactaggtaaaaagtaacaaggtaaaagaagatatcccatgctaaactaatcaaaggaaagcaggagtcaatttcaagtcagagtctagggataaagagggtcatttcatgatgacacaggggtcaaccagtcaggagcatgcacgatgtgagcacagagtctcaaaacacatgaagcaaaagctgatagagctgcaaggaaaaattacagacaaatctgcaattacagtcagaggtttcaacaccgctatcaagaatttgtttgtttgagacagggtcttgctctgccacccaggctcaaatgcaatggcacaatcacggctcactgcagccttgacttcctgggctcaagaaatcctcctgcctcagcctcccaagtagctaggattgcaggcatgcgctgccatggatgggtgagtttttgattttttgtagagatggtgtctcactttgttgcccaggctggtctctcaataattagcagagcaagtagacagaaagtggatgataatatgggctactcaaataacacagtcattgccgtttataggacacctcgtggagcaacagtacacaaattcaagtgcgcatgcaacaaccgccaaccataatcggggccatgaaagagtctcaataaatttaaaaggatccgaaacatagaatatgtcctctgacaacaatggctttaaagtaatgatcaacagcagaaagagctctggaaaatgcacagatatgtggaagtgaaatagcatagctctaaactcatgggtcaaaaaggaaatcaaagggaaaattataaattattttcaacttaatgaaaacaaaaatacaacatatcaaaatttctgggatgcagttaaaggtggacttagagggaaatttatagtactgaatgcttgtacagatcagtgaccccagcttccaccttaagagacctaaaaaagaagagaaagtcaaacccaatgtaagcaaaagaggctgggtgcagtggttcatgcctgtaatcccagcactttgggaggccgaggtgggtggataacctgaggtcaggagttcgagacaagcctggtcaacatggtgaaaccccatctctactaaaaatatacaaaaattagctgggcatggtggcacatgcctgtaatcccagctactcaggaggctgaggcaggagaatcacttgaacccggaagatggagtttgcagtgagccgagattgcccccactgaactccagcttgggcaacaaggcaagactctgtctcaaaaacaaaaacaaaaacaaaaacaaacaaacaaaaaaacaagcaaaagaaagaataaagagtggaagtcaatgaaaaaaaagtgcatcaacgaaaccaaaaagctatttctttgagaagatcaatacaattgataaactgctatctgattgttcagttaaaaaaaaagccacaattgccagtatcagaaatgagaaagatgacatcacctcatacttcacagatgttgaaaggataaaggaatattatgaacaactttatgctaataaattcaacaacttatatgcgatgggcaatttcttgagcgatacaaactacatacattcagtcaagaataaaataaactcagcagttgtatatccattaaataattcaaccacatataaaaatgataatacatcatgaccacgtgggctttatcccaagaacacaagattgatttaacactttaaaatcaatcattatactctatcatattaatagatcatcacgcaaaaagattctcaatagatgcagaaaaaacaaaatccaactttcattcctgattaaaaagactctcagcaaacaagagaaaggatagtcttttcaacagtctggaaaaaactgattatccacatacacaaaaaataaacattgaatcatatctcatactataaacccaaataaacttaaaataggtaatagacccaaatgcaaacctttaaaactctaaaacccttgtgactttgggtgaggcaaagatttcttatatatgacaccaaaagcaggatccataaaagaaaaacataaattggatttcctcaaaattaaaaaattctgctctttgaaaaactgttaagagaatgaacacacaatccaaaggcttggagaaagcatttacagatcacatatctgataaaggacttgtatccagaatatgcaacaaactcccaaactcaataataagaaaataaacaacccaattaaaagtgagtaaaagatttgaactcaacgcttactacaggagatggagaataaacagatgaaatgatgctcaacatcattggccaacagggaaacgcaaattaaaaccacagttccatctatcaccacacacctattagagtatttgaaattaaaaagacaaaccataccaagtgctggggaggatgtggaatgtaaaaccatacaatcgctttggcagtttcttaaaaagtttcacatatggctaccgtggcatccagccactccactcctagacatctattcaagagaaagaaaagcattcatccaaagacttgtgcacaatgttcggatcagctttatctgtaagagccaacaccagaaacaacccaaatgcccaccagcaggtgaatggacacaaactgtggtacattcatacactggagtaccatgcagctgtaaaagaaatacgcattgacaaaccaaatgacgcaggcaaatctcaaaaataattgtgctgagtgaaagaagctacacaaaaagtacatattatatgattccatttgtgcaaatcataggaaatgcaaagtaatcagtagtgacagaatgcagatcagtgcttgcctggggatgagggagggcagggagagatgaccaagagggaacccggggtgttcactatgctgattgtggtgatggtttcacaggagtatccgagtgttaaaacgtaccaaattgaaatatgtggcttaccgtctgtcaattacaccacaataaggctactttttgaaaaccatgaggatggctcaggtccggctcaaatgcccccaccctgcgttccttccttgggatgtcagacgctggagctggagcagaaggggacctagatgggcggagatctagccctactcacccactggccacggggtaggcgagggacgctcagcaggggcttcccgcagacccagggtcttcaagccccagaagtcctgatgccagagggaagaggggatttgcccagagtgaggggcaggggctggacccacagcccctcccggcgcgcagaccccgcccccacccataaccacgccctcagcccccaccacctcgtcctcagccccacaaccacgcccccagcatgccacaattactcccacaacccgcccacagcccctgcgacctgggtcttagtaccagctccatctaaagccgcaccaccggcccctcccatgcccctcccatgcccctcccccatctcttccaggccccgccctgccgcagaacccgccctcaagccccgcccccgcctaaccacaaatcccgttccggtctccttacatgccccgccccttccccgcccccgcggggaatcgacacagcctgtctccgcctttcgccccgccccctccaggccccgccccaccccgcccctcgcccgcgcaggccggagtcgcggcctccccagctagtggtcgcgggcgcggtcgcaggggcagcggggtggccgccgcgccaggcgtggagctgggtctggcgggctccgagaggcccgggagcggcgcgcagagcagcctccggccgccgccgcgcaggtaaagcccccgcccagccctgggagcgtggattcccacccaccccatgaccatccccccgccgcgagtgctggggtctcgggggtcccaggttccgggggtcctagggccggagggtctaaaggctggaggtcctgggggtccgagcctctcccggccggctccgcgcgcggccccgccgtccacgcccagcgcgggccgcgcgcacagggcttggcttctctgttttctcggtttccttcttcaggcagttgaaagaaaaggcgcggttctgtgcccggtgcgagccgcggctcctttagggctggcagggaagggcttgctgggttatgacagtttttaggggttgtcggagtcagccaggcgttggctgctggagtagcccctggcgcgcgagcgcccgctggtgcccggccacgtgcccagcttgacccgcgctccaggttcgggagaagctgcagccgtcaccgtcctcctggcgtccaccctgaggagggaggggctgggtggtccaagccgccgccactccgccgcccggcctttggtccccagcggtgctgtaggtggccaggggtggccgcagtgaccacccactgggccatgcggagccccctggcagtgccagctccctgcacttgtgggacgctcctcccgggcgcattgggagtctccagaagtaagttacaggcagagctgtttaaggaggcgtgctccccaccccagacccttcagtgggccctcaacaccctccccaccagtggacgcgtttcccaggtgaccgcagccggcagtgctgaccaccctccctccctctccgctccctcctgcgtcttccctttcagagctgccagagtggactgcactgcttctcccagcggggcaggatggcggtttcatgtctggttggataaggccttgcctgcggaaaccagctccatccccaggccctagcagaggctcgcgtgtccccgtccccaggtcaggtcaggatgggcaccgtgcgcccacctcgcccctcgctcctgctggtctccacccgggagtcttgtctcttcctcctcttctgcctgcacctgggcgccgcctgcccacagccctgccggtgccctgaccacgcaggggctgtggctgtcttctgcagcttgcggggccttcaggaggtccccgaggacatcccggccaacaccgtgctcctgaagctcgatgccaacaagatctcccacctcccggacggggccttccagcacctgcaccggctcagggagctggatctgtctcacaacgccatcgaggccatcggctccgccaccttcgcgggcctggccgggggcctgcggctgctggacctgtcttacaaccgcatccagaggatccccaaggacgccctgggcaaactcagcgccaagatacgcctgtcccacaaccccctgcactgcgagtgcgccctgcaggaggccctgtgggagctgaagctggaccccgactctgtggacgagatcgcctgccacacctcagtgcaggaggagtttgtggggaagcctctggttcaggctctggatgcgggtgccagcctctgcagcgtcccccacaggaccacagacgtggccatgctggtcaccatgttcggctggttcgccatggtgatcgcctacgtcgtgtactatgtgcgccacaaccaggaggatgcccggaggcacctggagtacctgaagtctctgcccagcgcccccgcctccaaggaccccatcggcccggggccctagcgcctgttccggcagacccccgccggtggctgctgtcacttttgtagtaggtggtgactgatgctgcttttgctcttccctgaggcaggtgtcacagccatgtgtgctccccactgttgcactcaggcacagcagcacctccaggctgggtggttttgccacacatccgtgtgacggatgaggaacctgaagcttagaggaacggaatgactgcccgtgacgataccatcaggaaattatcccagtggaacttcaacccgggctgtccatcgtgacattccgcctccttccaccatgccagcctctcccacacggggccctgcaggctgtggatatgcactcagaggactaagggggtgctctgcaagcgagagggttcaccagagggagcttgggtgcaggttcacccgctgaaggcgctgataagtcctgtgctgaggagctgacttgcccttgtttacttacaaagtgcattgtaggtaaacatgagccttgttccagtgttcgaagtacattggaacgtaagccctgtttccagagcaaagtaacagagaccaggtttttctagagagctaagtgggatgtgtagctcaaacaaactgtcctacccttttttattctcaaatgtttgttttgagtaaccgtagtgccaaaatttcagttcagtaatggggtgaacaatatggagagagacctgggaaaagtccagggtagcttgcccaggggaagacagcagccacatacctgggggcccgcctgcttcctgcccctctgggtgtgcctgatgcgggaggccctgccccagggcgatctcagctcactgcaacctttgcctcccaggctcaatcacttctgctgcctcagcctccctagtagctggaattacaggcatgagccaccacgcctggctaatttttgtatttttagtagagaccgggtttcaccatgttggccaggctggtctcgaactgttggcctcaagtgatccgcccgcctcagcctcccaaagtgctgggattacaggcgtcagccaccgcgcccggccctgtgccttgctttttctactcactaagatataaaacagctctttttccaaggcccggagtactggggattgatgtttcaaggccaatcaatgggatgcttcgttttctccagcaacaggaactctctcttttcacctttgctgccaggaatctcagagataatttagtgctcaatttactaaccttacttcacattcaggttagatgttacctccacctatatgatagtaattcctaattttattttttattgtcctttttatgagtgtttatattttaaagtactttgagtatttttggggggggtgtaaatgagtgatcagtgtacattgtgtgtggactgaagtgtaggtatgtagagatgcttcgccaaacagatgcttaaaaatgaatggaagttgagggtggtttctctttggaaagtatcaggtgacttggaaggtgagagcctgtccagggtgtgtgcactggttctgaggtaccccgtgtgtgcagtgtgagtcacgggggtgtctgtgttgtgaggtgcttggtaggctttgctctgcccacagtgcagacgcggggtgggtgaggggccaggcccagtgtatgagtggaggcagccccaggctccgcctgcttccctcacgccacgctgcctgagtgtcgccatgctcggaggacagagacctccacggaaactggcagcgccactcacccttccagtgagagctagaaccaagtgccagcccccgggggtgcacccgtgctggtgtggggccacgtggtccttgtggtccaggcagggccagcatgtggcggggtgtccagctccactgtttggaggaagtgggcgctgacacagcagagtgccctgggcccgtggggatttccttccagaggacacgtggctgaaagcataggataaggatgtataggtgaatgactggtgccatccctggctgtctgatagatgcaggtagggcaggtgaactgttgctggcctggccagcaggcctagggtcacatggtgattggcgtcctcctgccaccccttctccatgccagggtgcctgtggtgggtttgcccagcacgcatgaccccaggtcccaaggagagtgtgaactgaggcctgggtggtgaaggcagggcctctcctcagccctgtgtcctgtgggtgccagccagtcccatctcgcattttggggtgccctttccctgctgccaggggactcttcatttgtccttaccctagaatcagcccagacactggacatcacccagacgtggcccttcaggaggtgcacagggcaggggcaggcccgtccctccctgccccaatttgctgggctgcctcagcccagggtctggccttctccttggtgaaggtctgctgggcccctgtccacctcctgctgggaggaggagatggggagaggaccaggaggacaccggaggccctgtcccctgcactgtgagctcagtcaggtccatgagctgcccaccgtcctggccttactgtgccccctgccccaccaacataggtgaaagcacctcccctctaaggaagaccatagagaccccaacactgtgggaccccaaagctccttcatgctcactggagctcccaccgtgggtgcttgcaagtcctcagcgctcccggggtacagccctccccttcctgccctctaatgtcctcccctcccttgcccttccctccacttcctttctctgccgtcccctcctctcccatcttgtgacctctttactggcggggcctggagcccatgatggacacttgcggaaggaggggtggcggagcacccctgagatgacatcgctgcctgccccagagcaccccgcctctccctgtgactcagttctttgcagcccagatgtgagcatgtgcaccctgggacctgctgcccgttgggatgcccaggccaaatcagcccctctgcctccatgctgcactgattgcaagagtttcccacatctgcagaggccgtgggctcagccccacaccagccaggccaccagtgttgatagcggtgaggcggggacaaagggaatgtctcagttcacagtgtggacatggtggaggtctcggccttgcgagacaaggcagggggaggggataggaaattgggggtattctgtgactcctgggccaccggggagccagaatcttccagccagactggatgggcagggcttagcttcctgatgccgcccattcaccactttcaccccgggaacctacctgggcatcatgggaggcagagcctgaaccccaacccaaccctaactctaatgctaacccctaaaccatcccccaccctaacccaatcctcgccctaaccctaatgctaacccctgacccgacccaatcctaaccctgatgctaacccctgactcaactctcaccctaaccctgatgctaacccctgacccaatcctcaccctaaccctgatactaacccttaacctaacccaacccagccctaactccaactctaaagctaactcctaaccctaggagaggagcccaggccgggccctctccctgctggtttcctgttgggctttggagccccagatgcctgcccagaggcttccttgtgcggggtggggtccagcagtgggggatgggcccagagctggtatagccaccagcagagccatcctgatccacaggaccatccctggtggggtggggccccctggggcaggaaggccactgaggccagggagactcccaggcccactcacggcgcaggccccacaggagctggctggaggctatgggtgcggggcgtgggcctgccgggggttgcgtgacaggcagtggggagtgggttgtgctggcagctgtgggtgagtgaggaggctcctctcatgaagggccctggggaagtggaatctggccctgagagacccccggcctcctctgcaggggctgctggcaggaggggaaccggggaccacctcccgccacagagcctggggcccccagccttgcctacagggagggtagatgagagtgtaaactgcatatgaggttgggctaaacctggacatgtgtttcataaccaaagcagccaggaatctccggctctgcccagtgatcatctgggcaggacatggggacgagtgtccaggctgaagtcagggcccggccagcagagggccattttgtattgagctccacagctggtcacattctgtggaatgtgcagacgtgcacggcccatcagacagggtctggagtggggctgccgtcttgggcagctcctcccgggtgtctgcaaaatgcagaggtcaccagagccaaggcagcaaggcaaggagcccggcttctaaggaactctgagcaggtgtggtccatggctgggaggcagctggccccacagcacatagcacggagggcggcgcggagtcctggacgctcttggcaggtcccctcatggaggatgtgggggattggcttaggcctggtctggctggccttcctggaccgcagtggccaggagctgaaaaccgtgaccccagtctccctgcagctgttcttgatgggatttctgttcgccagtcagatgcatttgcacaggacttggatcctgaactgtgtaacctggagaggcaggtgtgagcgggccatgctgctggcccagcctgtgccggtgtctgtttctgttgtctctcggcccttctgtgagccctcagtaaagctcttcgtgcttcagtcagcaagtgtggattctgtcgtcggcaactctgcggcccaaaccccgagcctccccctcccccagaccttgcagtgccatggagctgagggacctgtggatccacagctgtggccccggaagggctgcaggagctgaacctgcgtgagccccgcagagggtgcagagccggcttgtgcaggctcccagcaggctcatgacagcgcggatggttaaatgtagctcctgacagccaactgttaaggtttcaggcatttttgcaccaggtgacatgatggtagcctgaacgtgaccttggcagcagtctctacatcaaggaaactggcaaatgtcaacatgctgggtaccctcgctcctgccgccgcaggctgtcagtgtcttccagcccacactgcggggggccttgttgtgtggctgcctcccaggctggggcgagggtctccagagaccaccatcgtgcaggctcttggtcaatagcagggtgtggtgctcctgccaggggacgcattctccgtgtgacctctacaccccaggtcaggtcaggatgtgatttgcttctccagggccgtgactcactagatccacctcccactggtgcctggtggcccccgacagccctggccctgtccaggccctggcctgtcctacagtcacaggtgctggcctgtccctgctgtcctcctgaccacctggtgctcccggccaccctgcccgcccccctgtctcctcgggacagcctggctgcctccacttgctggcccctgccggcccaccctctttccaagcctgccctgcccctcagctcctggggtggggaggggagacctcgccttctgcctgcagcgactcccacctgtcacggagcccccctgcagcaccaccaggccctgccctttcccaagcagagggatgggacagccgtgcagatctcaggtcccgcccctagggaagggcctcgctgcagaagccaggctgctcaccttggagtgtggggaaccagcgcccctttcagcacccggtggtgtctctctgtgggaagggagcggttttatccaagcaggacactgttttctgtagttttaccttctttcaagaaatgtcgtatatgagacctccgttgagtgtggcagctgttcattgatattccattggatgcactagtgtgtcctagtccccacgatcaatgtgtaaatcgtaacatccaatcatagcgagtttcacacacacaggaataaataaatggagagtgctgtaccgggctccattcgcctcctcctgccgtgatgcaagcctgctctacctggcttcccatcctcacacccgcctacgttctccctccaaatgagtaaaagcaaatcccagacctcaaaaacaaaaacaaaacaaaacaaaacctatctgtaaatatcagcaggagctgttcacacatagggcctcttttttgtcttaaatatataaccgcaaaaccaccatccacctgaaaatgacattccagcagttcctgagtcttcctcgctcggtgctcacatctccctgacggtctcatcgtattttccgggcttgctggaatcagagtctccccagcgctccgccgaggccgctggccaaggcctcttaggtctattagcttatgggccccgtttgtctgctgtcggctcccctcgcggtggttctgctgaagcagcctggctgccggcccggggacaccctgcctggattccgcggcgcccccacgcgcctctgtgaatgcgtgggctcgctggatttcccgcagggcttgctggccacgctctcccgtcagctgtgtgtcttccgttgcctcccggggacgtttgtagctgctgttcattcgcagggtgattgagcaggatccgctgggccatgagccctcttcacttgttagctagaatcttccaggaagcgcatcggtgcctccttccctgtgcctggttcctgcgggacggcgggagggtcactggccacgctccttgattcaccgagtgcagggtgaagagctgcctcctctaacagtgacagtcatgttgtaagcatcattttgcgtggctctaaacacatttggtggccttactttccctaatgcagccacagcatcctgtctgtgaccagaggcacctccgcatctgctctgtctttatgaccagccctcgttgtccttgcagcttcgtggctcttgggtgggacaaggggtccttgtcttgtcccctcctgccctggccctggggagccctgatttctttggggaggagaggcatccacagcctggacttgacaggtgctcgccgtgagccagccctgcctctcaggcctgcctggtctgtctcctcgaaaggtcaaacagcccgtgggctcccatggatgcttcctgtggcccagggctaaggtgccatcctcccaccctcgcctggccctcggtggcatctccacctcacctcggctccaagcaccccagaggcagagggttccgccttcatttcacctccctcttcaaggccatccccgtggtgggcagaatcgcagcccccagagatgtccctatcctcatcctggcagcctgtgaagatgttactttatgtggcagaagggactttgcaggtgggattaaatccaggacccagagatgggcgatgtcctcacagggtcctagtaagtggggggcgggagctgtgagcacagggggtcggggtgctgtgcggctgccttggaggtggaggggggcaccctgagccacgcatgggaaaggcaggaaacaggttctctcctggagcctccagagggaaccagccctggcagtaccttgattgtagccccgtgagacccgtgtccaacctctgacctccagaattctaaaatagatggcgtcggtcaaaccccaagtttttggcaatttgtttcagcagccacaggacaccagccacctccccacagtgagagctgcccacgtgggcagagccgatggccctcgtgctctgggcaccctgggcaccgtccccagggctcagttctgggggtgagtgtgtctttaatgccatggcctagtgaccacagggagctcacattgcctctgtcagcctctcctgcttccctgcaggacaggagtgtccctcccagatgggacaggggctgtggtgtggggtggctcaatgctgctggccacctggatcctcacacacactcgggcgcacacacaggcacacacacacactctcactctccctgtacacacacacacacatgcttactctccctgtacacacacacacacacgctcactctccctgtacacacacattctccctgtacacacacactctccctgtacacacacacacatgctcactctccctgtacacacacactctccctgtacacacacacacatgctcactctccctgtacacacacattctccctgtacacacacactctccctgtacacacacacacatgctcactctctctgtacacacacgcgcatgctcactctccttgtacacacactccctgtacacacactccctgtacacacacacacgctcactctccctgtacacacacattctccctgtacacacacactctccctgtacacacacacacatgctcactctccctgtacacacacacactctccctgtacacacacacacatgctcactctccctgtacacacacattctccctgtacacacacactctccctgtacacacacacacatgctcactctccctgtacacacacgtgcatgctcactctccttgtgcacacactccctgtacacacacacacacgctcactctccctgtacacacacattctccctgtacacacacactctccctgtacacacacacacatgctcactctccctgtaacacacacacactctccctgtacacacacacacgctcactctccctgtacacacacacgctcactcttcctgtacacacacacacacgctcactctccctgtacacacacacacttgatctcactgcacacacacaccagcacacacgctcacacacattgtcttacacacctgagctggggaccgatgagactgaccgatgagagttcagtgacagcaaaatcctgcagcctcgtgacagggctcagggagggctgcctgcctgggaggggacagcagccatggcctcacgtggccaaggttgctagagagggggcctcaggtcatcctcacatgggcctggtttgctggtcgtatttctattttcagatgagaaacttgagactgaggtccagaggggagaaaggacgcactcaggacagggcttgtttggggcacagctgggctggagtcggggtctctgacacccagccctggagaccctctctcggcaacctgggccatggcagttgtcaaaacaaatcggcaagtccttgatggagccccagaagggagagtggccagtgccacggtgagcagtgcccagggccacgctggctaggagcggggctgcctatgctgggagccctgtgcactgggctctgcacccgtagccatggcaacgatgctggctggagatggagtggacgctcaggtgccgctggatgatgccggccacctgcagttttggggcccagctggaggtcagcagggtggactcacaaccccctgagttcaggtacagggagctgtggagacaggcccacccaggctgaccttccccagagccttgctgtcacggagaggagggggcgttggaggaagggccacaaatgcaggagagggggcaatggcctgggacaagatggagaacagccacccgttccccagtacagccaggtcaggacacggatcccagcaagccctttggatggggagactgaggtacagctgatgactcaccctaggtgataccagctgtgagagccggagtggggatgcagacagggagggtggccagtggccacctgcgaggactcagcagccagggcgatgacgccagagagtcaaggcgtgagaacccccgagaagaagagtgagtgtcattcacctaacgacgcggtgactgcacatttgcccaagttgtaactgtggcaggtgcagcgcgcagaccaggcaggagatggagagacgtccagggggaggtctcgctgtgtcaaggtgctcagctccaggtgccagccggcccgagacaaaagtggaccagccttgacgccctggtctgccgcctccctccattgcctgcctccccggctgcatacacgttcagattttaggcgatcagtggtggaccctacaggcctctgtgggcagtggtcacctcgctctgcgcttaccccaggggctcgcggcttcaaagggtctgggtgccaggtgggccccagaacagctcccgatgtgacccctacccaggctgcaccagggagccccctccgtgcacacaggtgcgctggaggtagcctcctgggatgggccaggtgagctggaggtagcctcctgggaccggccaggtgacctggaggtagcctcctgggatgggcgccctgtctcctgtcctcacactcagcttggcagcatgctggggaagctgccctctcgaccctcctgggcacagcttgcacttctgagccccagccaaggcgagtaggcgggcgcaggtgacgggctcagggtgctgcccgagagcagctctgctcccggtcagcgggacccaggtctccgcaggctccgggtgcctctgatgtccctgtagccactggcaggggtgacgagatccaaggctccgggtggaaacgccaacctccgatccttgccctgggcctcagccgagaagtcacgtggacccagagcctgtggaaatcacgatgattgggccgtgaagacagagggttcctgagcaagtcattcgaatcagcatcaccagaaagcggatgcctcatcagtcttcaggtgtttagcagcccagggacaaggactgggaagggacacttctgtccagagtctagccccggactcagggctcggctgctgctgttgcattcccttggtacctcgtgggtatcacttaggatttaagcctgtttttcaccagttgggtctctttcatgcctgggtgtagccactggagtgaacccagcccttggtgtgccgtagcttcagcatttgtgctggtatttcagatttatttatttatttatttatttatttatttatttatttatttttgagatggtgtctcactctgttgcccaggctggattgcaatggtcagctcactgcaacctctgcctcctgagttcaagtgattctcctgcctcggcctcccaaagtgctgggattacaggcgtgagccaccacgcgctgccaatgcagccctttttaataaatgacatgagtcacaagagaatctccaagaattactaggtaaaactacttaggaaggaatacttggcttccaggtattaaattacacgaaaatgctcagtaaacaaatcaacctacaattggcataacttttggaaaggttaaagttacaaatgttggaaataaaaagattctagaatagaactggcttttttttttttttttcattttagggaaaaacattcttaaggtaaaacaatggaagtaagtgaaaatggaagatgcctgtccagtgtgacatgtttgtgaaatatatagttttatatattttaaaatataagtaactagatctgggctgggcacagtggctcacgcctataatcccagcactttaggaggctgaggcgggtggatcacctaaggtcaggagtcacttgaacctgggaggcggaggttgcagcgagccaagatcattgcactccggcctgggcggcagagcgaaactccatctcaaaagaaaagaagagaagagaagggaaggggaggggaggggaggggaggggttgcattgggattttgattggaattgcatagaaactccatattaacgtgggacattttacaatgctaggacatcagtttgaaggtttgtctaagtctttgtgtcctgcagtctgattttgtttatttctagggcatgtggacagttttaaccaggtcctcttcccgtatgatgcggggaaggggacagtgcggtgaactttgcagatggcgaaaagacccaagttttatgcgcctagactaaggaggaggatacttcccaaatggtagctaatttctagacgcttggtagttaagtttatttggaggtgataagcatgttgttgggaaatgatctggcttacatgtgctatgtgtgatctataattacatgtcctatgtaatgttaaggattatctgtactgggtgatactcacatacttgagaactgggtttgtggattttggcctggttgacgtatgacaggttgtcacaacagttcatcttcttgcttaatattcatgcggggcacaacttaatgtacaataatacacaaacgtacaatgtgtgatgaaacacatagcacatcattaaaagtggcaagcacaatgttcatggttatcgtaataatttataggagtttttccaatactgacatggcagttaatattaattaattgcacctcaagtatgaatgtcagggggtaaagtagaatcacgctttgggtaccagtggtggagcagatagcttcttcctcgaattggcctagggaggagtgctctccatttttggtttacaagaccagagtcacataaatataccacaaggacttcttcctttcagtagcttgtcttcgattcagctagtgagtggtattaaaaggagaatgagagggaaatacatagtggatgcttcttgaccaaccataatgaaaggctgttcaatgggctgacccccgagccacgtatgtgtgagaagctctgctcctagaattcaaatggacattagctgaatggtgggatattatggatgctccattgtttagacaggtgaagtattgggacaatggccaggatgagaacagagaagacaggggccagaattcctcctgaggtattgggaatggagcatagggttgatgtgtcattctggtttgatgtgaggtggtgcgttaggggatttgctgggctataattatctaggtctcctagtaggtcaggttaaaacaagactgcaacaggtaatcatcatgggaggagaaccaagcctaaaatgtttttgtattttttttttctgagacggagtctcgctctgtcgcccaggctggagtgcagtggcgcgatcttggctcactgcaagctccgcctcccgggttcacgccattctcctgcctcagcctcccgagtagctgggactacaggcacccgccaccacgcccggctaattttttgtatttatagtagagatggagtttcaccgtgttagccaggatggtctcgatctcctgaccttgtgatccgcctgcctcggcctcccaaagtgctggggattacaggcatgagccacctcgcccagccctaaaatgtttttaattgtgtagtatgggtgaaatgggattgtgccacatctgatgaaattcctgatgggttgttggatcccgttacctgaagggagagaaggtggacagctaccaaggcagcgacgtgaagggtaaagtgaagtgaaaagtgaagaatcgtgtcagggtggctttgtcaactgaagatctgtctccacctgactccactagataggtgccagtgcatggaatagctgatcacagggttgtgatcactgtgtgtgagcgctccttgtatgagtctgttctcacactgctgtaaggaactacctgagactgggtaatggacgaagaaaagaggtttcattgactcacagttctgtaggctgtataggaagcatggctgtgaggcctcaggaaacttacaaccatggaggaaggctaaggggattcaggcaccttattcacgtgacggagcaggagaaagagagacaagggaagaagcgccacacgcttttaaaccatcaaatctcatgggaacttgctcactactgaggactaagctctcattttttttttttttttttttttatcttgcccaaattcctatctagatgatcctaaatcctatctggatggtcatgtcctacaaaccataaattctcatgagatggttttatttaaccctacatgttgtgacttactttccagtctgactctggcatgacattatgtgacaaagaagaaagtcaaaataatttaccccaaaacatgtttctttgacatatctttgctctgcaaagctgtcctttgtgggggaaaatttgcatctctaaagaatctgtattaacatagctagatctttttcttccaagtcctcccaatcctgaagagattaaaagtctagcaccttttaaagatttaaataggaaacattgtcatctattgtctctaagggcagccactatgagacttccaaagaaacttggtctccacaatcttttatcttaactaacatttcctttctatgatcccaggtctttagacaaactcaaccaattgttaaccagaaaatgtttagattcaccaaaagcctggaagtccccactttgagttgtcccacctttctggaccaaaccagtatatttcttaaatgtatttggctgatgtctcatgcctccctaaaatctacaaatccaagctgtaccccgaccaccttgggtacatgttctcaggacctcctgaaggctgtgtcacaggccatggtcactcatatttggctcagaacaaatctcttcaaatattttacagagtctgactctttttgtcgacactatcatgagaacagcaaggaggaaattcgcccctatgattcagtcgcctctcaccaggcccctcctccaattcgacatgagatttgggtggggacacaaatccaaaacatgtcactcctcaaaaagacatttgtcttcatggtagggcgtagcctatacatgctgttgctatcactgccaatagcagaaatgatgtcaatgtttccggtttccagaaaagtgtaggacccctgggataagcctcttcctacatatataaataggcagatgagaatattgatgtcaatgtcagataactcagccataatttacatctcagcagatatgtgcaacagaggaaaatgcagttactgtatctggtgtataatgtatagctagaaaaagtcctgtaatgatttctagggctcggcagacccctaaaagtgagccgaaattccatcatgcagagatagttgatggcactgggaagtcagtgaagaagtggttgataatttttattaggtggtgggtttttcaaatgtcgaccactagatttcttgttttttgttttttgcttttggagatggagtgtatatctgttgctggagtgtaatgacacgatgacagttcattgcagcctcgactttccaggctcaagtgatcctcccacctcagcctcccgagtagctgggaccacaggcatgcaccaccatgcccagctaatcaaaaaaaaattttgtagtgatggggtctcactgtgtttcccaggctggtcgtcaactcctgggctcaaatgatctacccgccttggcctcccaaagtgttgggattattgtcatgagccactgtgcctggcccagccatagacttcttacagttgaaatacaatgatgattttttgcatcattagtcatggttaaatgccatgtgagaattatgacatacaacatatttttattaagtacaatgtttgttgtaggttttgtgggtttctcttcaaaacctttgccagttttggggggtttgggttaattattagtggaagggtgggttgtggtattgtattaaaggtcagtggtgcatttataggattaggagtatttttaatttatttgggggaatgatagtgatgtttggatgtaccgcggcaacagctactgagggttatcctgaggcttggggtctaatgttgttatttgagggctttaattgatggggctgttgctagagttagttataattgcatgaacagcagggcatgataaggtagagattgattttaaaaactaggagaacaggccaaatgcggtggctcatgcctgtaatcccagcactttgggaggctgaggcgggtggatcacctgagcttgggagttcaagagcagcctgaccaacatggagaaaccctgtctctactaaaaatacaaaattagccgggcgtagtggctcatgcctgtaatcccagctactcaggaggctgaggcaggagaatcgcttgaacccgggaggtggaggttatggtgagccgagatcacgccattgcactccagcctgggcaataagagcgaaactctgtctcaaaaaacaaacaaacaaaaaaaatcaaaaacaaaaaactaggaaactgatttttgaggatgaagaagtaggacttcttggtgaagactgtaggtatagctatacaggtatacagttatggtagttggttgatggtggtggctggttgatctttatttgttaggatttttattgtaactgaagttactcaagggtattgattaggagtgtggctaggaaagtggggtgaggaaagagagaaagtaaagtttgattaggcctttttggttggatacagttgttgaggttagtgtttggagctgcgttgcatttgttggtattgttgttctattcagatcaggtctagctggagggatgctgtgtttagaccggcagttagattcaagtgtggtgtcgggccaggtgaattggaattgggaaatattctaataggttggaaatttatgtgggtgtaagcggggttcaaatctgagatgacgtatgatgaagttgcattctattgccaccgtaaatgctgagaagccacagcaagagctgtgaattgtgggtctgagggtgtggttatgtggggcagagagatgggagtcatgatggtggaggtgaagaatccggcagaggcaccaccaactgagttgattagaaggggtcactttccttgatgacacaaccaggttgtgaagccaggttgctctaagagcgggaagacagcattcgagtgtgaaggcagctgtgagggaggaggcgaggggcagaatcaggagggcgcaggtgtgggtatatgtgtgtttgtggttttgacgatcaggtctttggagcaggtgcccccgaggaaaggtgcacacatgcgcgcaaggctgccggtgacgtgtgaggacgaggtcaagggtaaggctttcaataggccctcatttttttgaatgtcttccatggctgatggtggtcatgggcccaattcgtgggagaatatcagcgttagggttgagaatgaatatgtgttgaaattctcccgtgttggagcacagtggaaatcatgctgcaatgaaaccgattctcccatgaggtcgtagaagctgcttgcagggctgctgcgttagcctctgctccatcagccaggtggtggaaatgatataatacctactcctccccatctgatacaagttgaactggatggttggtggtgactaggattagcagcatggtgagaaatatgggtagatatttaaagaattgattggtattaggatctgagtgcatatgttacattgagaactctgtaaatcaccatgtgacaaaaagtgctattggtaataatcgcgtttaaaactaagtgagagctttcgggtttggatagttattcagggtcagtgtgagataatagttgcttggcccgagtgaataaacatgagagctggggtaattctggtaatgaagtttgcacactgtggacgtctttactgaattgggtaggcgttatctcgacaggtgctggttgagtaataacagttggtgaagtcaataagattcatgaagttagaatgaaagaggagaatacatttattacttttatttggagttgcaccaattttttgattcctaagaccgatggattacttctatcctttaaaagttgagagagaaaaaacaaaaaacaaacaaaaaaaactagttaagagttggtcacagccgacaccaggaaaaggcagtcttccaatagacagaaagcaccgcacctgaagctggtgatctgcagcttcccagtaagacctcaggagttgggcgagtgggttcaagcacattaagaagcaaagtggtgaagtttaactggtatgtgaccttccgctggaatgctcagctggcaagggaagagcacctcaagtgagcatgtgtacaatttcagggcacacattgtgcacgcagcccctcccacatgctggcaggccacggcgcgcgtgacagcccaccccaagggaagaatcacaggagaagagacgcagaccccggaaccatgccaatgtataaaaacccaagtcaaaagtcaaactgtgcacttgaatcttccaagtcgcccacttgaccctcttccaagtgtactttacttccttttgttcctactctaaaactgtttaatcaactttcacttgtgctctaaaacttgcctcagcccctcactctgccttatgcccctcagacgagttatttcctttgaggagggaggaattgagttacttcaggcccggatggatccaccgctgctgacgtactttggtgctgacgtactttggtgccgtgactcggatacattccctagaggtaagagatctctacgctttgccttcatgaatattcctcttgcttcctcccacttcctcccatagccaagggattgtcccatctgcttaagcatttgttcttcatgttaccccgggaggacgaggaaccccaaatacaaatcttcctccatttctctaatcacttccatgctcttctcaatatgcaccaagaccttcaaggtcatatctgaagggaggggagtccgaccccctgtggcaattagccaaaaaaaaaaaaaaaggcttctgatatggtttaatctcatcttaaattgtaatgcccacatgttaagaacgagacctggtgggaggtgattggattgtgaagcagtctccccaggctgttcttgtgatggtgagtgagttctcatgagatctgatggtttaaaagtgattggcagttcctcccttgctctctctctcctgccaccctgcaagctgtgccttgcttccccttcacgttctgccatgattgtaagtttcctgaggcctccccagtcatgaagaactgtgagtcaattaaacctcctttttaaataaatgacccagtctcaggcattctttatagcagtgtgaaaatagactaatacagctcctcatctccttcaagaacatgggaactgggaatccgagaagagataccaccttgttgctagcatgctccaagtgagagtcactatcaggtcatggagatgaggatataggatggcccaaggccgcaggtgcaagagacccataggacagagatgaaggtttttcccaggctatcagattaccattagaacagagatgaaggcaaggtgaggggtacacagaccagttcattccacaaccccaaggatgaacacggggccccctgttcattctggcatcttccttgttctcatgcgggtaattgtgacaaaatgggaccaaggttaagggtacgtcgtaaaatgggttcattctggaaccctaaggatgaatgggggtgccctgttcaggaaaggataataaggaaataacaggggactccttctttttccttttttttcctcctctgttctctctggataatcacatctctataccacaggacacaccccttaaatgcatccccaagaactgggaaaaatttgatcctccaaagcttaaaacaaaaaactcactttcctttgtaataaaaaggaactgggagaaaattacaagagtcaaccttagaacccagtgtccctatgcagaaaaatcctcaaattagcctcctcagttgtttataactgagagcagaataaggaggacagggctaaggagaaggagaaacgcagggacaagaggcaggctcaactattggctgttttacaagccctcccgcccctccaggttgccctcagaacaccctcccaggtaactgccatcgctgcgggaagccaggccactggaaggcagactgcatcagtcggacaaatgggaggaagctccacacagctggccccctccgccacactcagccagtggaacaggactgccctgagggctgaagggccctgggacagattctcaacccctgatgactttcagctgaaggaactgtctgcacagctggcctccaagtcagacatcgtataaattaacaaatttccttgtcaattgtgtctaactgcggctgccccaagacttatcatacacagacaattgttgcttcattttaatcccctttaaaagatggttttataatcaatataggactctaataacaggtgctcttaagtcacctgccccagaggggaggcttgagtgacacctggagctcctgcaccatgggggagacatgagtgacacctgagcacctgtatcttgtaggaggtctgggtgtgacgtgagcccctgcagcagaggggaggcttcaggaacacctggagcaccggcatctcacaggaaggaggcttgggtgtgacctgagcacctgcaccacgggagaggcttgggtagtgtgtggacacctagaccacagggaggcctgggaactgcctgagcacctgcaccacgggagaggcttgggtgacacttgggcacctgcacccaacacaggtagcagtgatcacagtgaaaacattttgttagcagtcgtctgcttcctgtcctggcatgagcagcaacgggtaaagggcactcttgtcagctgaggggatgagtggggctctgcccagctggttggagactccagcaggtttgcaggaggagacggaagagcaaggagtggaggcaaaaactgctgccaagatcctgtgggaaaacaggaacccaaagaaggaactccaatgggaaactaatttagacaacaatgatcttaaagtttttgctccttcgagactgttgaaaagaactcccacgagtgaacaaaagacgcctggccgaggacactccagagtgctgtcacgagggttccctgcagttttcagaaacttggagcatgtggccacagcggcttgcacgtgattcatacggcacatcttgtcaccatgtaaatgtttatcagcagagacaaagaccagaagagcaaccttggaaagagctaaatattccgatgttccagcattttcccctctggtttgtattgtgaatttttaaaatctcgattgacaagttctggtgtttttagttttgtttccacccagcagtgctggtgccctttgattgtaaacagagcagagtgcaccgggtgggagtgcatgtggctccctgcgtgtgcctgggtgctggcagcaccttgtctgcctccttcctccctggcgccagctcctgacgcaatcagaggcccagtgacacccacagcacagggaggaagtgcgtggatgtccaggtccctccacggagcacagctgtgtagcttcaggtgctcagggaggatgccccattcactcctccctcatgggtaaactgaggcacagggatggggaactggccagtgggactaaacacaagatgtcctgactcctgtgtgggactgttgcctctttgggccttgcattcatcagggctcagcaaggaaacagagccactaggatgtgtggagaggagcagagactttgcacgaggcattggctcctgtgcggtgtgggcgggcaggctcaggacccagaagagcccatggtgcaggccaagcccaaaggcaggctgcaggagaaggccttctggcccaggggggccagccttcttactctattttggccttcaactgattggaggagtgtagggaccagccccacagggttggtgggtctctccctgtgtgcagcgacgagagagtgtagaaataaagacacaagacaaagagataagagaaaaggcagctgggcccgggggaccactaccaccaatgcacagagaccagtagtggccccgaatgccaggctgcgctgttatttattggatacaaggcagaaggggcagggtaaagaatgtgagtcacctccaatgataggtaaggtcatgtgggtcacgtgtccactggatggggggcccttccctgcctggcagccgaggcagagaaggagaggagacagagagaaagacagcttacgccattatttctgcatatcagggactattagtactttcactaattgactactgctatctagaaggcagagccaggtgtacaggatggaacatgaaggcagactaggagcatgaccactgaagcacagcatcacagggagacggttaggcctccggataactgtgggcgagtctgactcatgtcaggccctccacaagaggtggaggagcagagtcttctctaaactcccccggggaaagggagaccaccccgcccccctgccgctttcccggtctgctaagtagcgggtgttgttccttgacaccttttgctaccgctggaccacggtccacctggtaacaggcatcttcccagacgctggcgtcaccgctagaccaaggagccctctggtggccctgtccgggcataacagaaggctcacactcctgtcttccggtcacacttcactgtgtcccctcagctcctatctctgtatggcctggtttttcctaggctatgattatagagcgaggattattataatattggaataaaaagtaattgctacaaactaatgattaatgatattcatgtataatcatatctaagatctatatctggtacaactattcttgttttatattttattatactggaacagctcgtgtcctctgtctcttgccttggcgcctgggtggcttgccgcccacagatgaggcccacccacctgctttacccgaagttcacagatttaaaaattaatctcatccaaaaacacacgccaaattgacccatgaagttaaccatcacagctatcaggtggggctctcagaggtccccacagcgcgcctgacctgggtggtttctccccttctccccgtctggccaccttgcctctgagggtacttccgggggctctgccagcaggtgtaccccaggatgaccagcctgccctgcctgaagctgcctccccacaggcccggccaggtccctgatggtctctgcacttcctccagtcacccctatccttcctggccccgcaggccccacctgcaaccccagtgaaatctgagcaccccagccctgagaggtgtggctgctcctccatgggtggggttggcagatggagctgataaaaatgcaggctggccagttacatctggatttcagatcgatagctgtctttcagtgtaagtacgtcccgtgtaacatttgggatatacttacactaaaaaatgtattcattgtttatctgaaattcagatttcaccaggcaccctgcatgtttatgtggcatcctcggccccacctctcctgaggccagcaactccaggccagacacactggagcccctggctgcccagggccggccaaggagaggcaagggcagggccaggcctcagggatggcgacagcagggatgtgtgggggtgggggtctctgctgcaggctgggctgggcttggcacatccccatgctccacgcgcatgcaggggcgatgggggcggcctctgaggtcatggaattccctgggctctcctggcctctggggctcctcatgctcacaggttctctggcctggccccttggccctgcttttctggctccctgaggaggctgtgacaggtcagcacccaccagccctctcagggctcctggttacctactggcctgaaggaggctctggaaaaatcaaagcttttagaaactaggagggtctggttagtcttaaaatcccagatgtggacctgcaccgagaaggaacaggctgggagtggtcactgcattagtccattttcacactgctgtgaagaactgcttgagactgggtaatttagaaaggaaagagctttaattgactcacagctcagcatggttggaaaggccccagggacactcacaatcccggtggaaggggaagcaaggcaccttcttcagaaggcggcaggaaagagaagcaacgcaggaggagctactgagcatgtatgaaaccaccaggtctcctgagagctcactgtcacaagaacagcatggggggaccaccccatcatccagtcacctccacctggtctctcccgtgcatgggaacagcatggggggaccaccccatcatccagtcacctccacctggtctctcccgtgcatgggaacagcatggggggaccaccccatcatccagtctcctccacctggtctctcccgtgcatgggaacagcatggggggaccaccccatcatccagtcacctccacctggtctctcccgtgcatgggaacagcatggggggaccaccccatcatccagtcacctccacctggtcactctcgtgcatgagaacagcatggggggaccaccccatcatccagtcacctccacctggtctctcccgtgcatgagaacagcatggggggaccaccccatcatccagtcacctccacctggtctctcccgtgcatgagaacagcatggggggaccaccccatcatccagtcacctccacctggtctctcccgtgcatgggaacagcatggggggaccaccccatcatccagtcacctccacctggtctctcccgtgcatgggaacagcatggggggaccaccccaccatccagtcacctccacctggtctctcccgtgcatgaaaacagcatggggggaccaccccatcatccattcacctccacctggtctctcctgtgacacatgaggattatggggattatggggcttacaattcaagatgagacacagctgcttcttcctttgttcttcctttccacacttctggggttaataagcgctgtgctttgttatatagctgataaaacagtcaaaggcctaagctattgtcaaaaacagtataatgccactagcttttgagtgtgtatgtcaaaatctgtttttctgtatctaacttttcttacttccttttgcaaagggaacctgcttagcctgatagtgatagtgatagtgtcatacttacgggaagccagctccctcgactttttcgtttttatccctctatttttctcgggctggagggcattgacacattcatttatttatttctcagaaaaggcaacagaggttcagggaggctaatgacttgcccaagttcacattgctaacctacaacagggctgaaggggatcatgtctacggtggtccatttccaagacaaagtgccttgaatcggcttaggtctgcaaaatacagaagaaacaggatatcccaggcccctgctcagacagccgatgcctgcttatcgggatcccccttagttgccctcacctgaaccaaagaagtttagtctaagataaaagtttaccagtctgcaaaatagctggctttgtctgttcttatcagcctgccagctacgtaggtcataagtcaaatatttaaagagccccagggctaactaggattgcaatgcactgtgggctgcaacaaaatgcagcaagacaaccctaaaaagacacctacagcccctgcccaacaaccaataggtgacatctgggaagactgtgaccccatagtgctcagcctatgaggaactgggggagggacctgcacactaagggataaagtgcttgttaaaaccatgctggaggctggtgcagtggctcacgcctgtaatcccagcactttaggaggccgacgtgaggcaggcggatcacttggggtcaggagtttgacaccagcctggccaacctggtaaaaccccatctctattgaaaacacgaaaattagccaggcgtggtggtgagtgcctgtgatcccagctactcaggaggctgaggcaggaggatcacttggactcgggaggcagagttacagtgagccgagatcctgccaccgcactccagcctgggcgacagagaaagaccccatctcaaaacaacagcaacaacaacaaaaccgggctgggcgtgccttcccatcggacacccgacctcgcaagactgtcattaaaagtctcactctcgctgttctctgggttgtgagtccattctctgggtgtggacaggtgagtttgtttctcacaaggtccaggacttgaactcaggccatgagaccgggccagggttgtgagcaaaagtgcagctcgttgcggtgcctccctcggcaccagtgggaggggagaggaccctggggctcgtcagcctggacacgccagcgctctcagccgtctcactcagtcccacgagcccacacagtggctgccctcaaagggactttggagaccacccagtctttcttcccagtttacagacccagagactcgggcccagagaagacaagtgactttgaacaaagcaaattagtggcaatgcccagacttgaaccgagattggcagagcttggtggtctgccacaaaccaccctcccccacagcaggtgcgggtggggggctccgttcttccggtcaccacagcatgttacaggtttctgcatcagtgcgcctcctcttaggaagaaacatctctgggctgggatggctagctccccgctttcagccatgtagaatttctcttggcattttagttagaagtgttgtctagatttcttaagtgtctgaggctgccctggccacagggatgagttagggaaaattaccgtttcccatgtgcgtgtgtgaagctctccatgctcactgaagtcagagtgagaagcagcaaacacgtcatcgggagggtggccagcaaggctgtgtcctttcacacgtcctcagatcatccttgaatccacccacattccaaattcattctcaaaaatgagattccaaatttcaggatctatttacagccagacgattttggtgccccctgctcaaaagctttgattactcctgtgcttaattaagtcacaaatccctggcccatcatccaagaccacttgtgatgtggttaaacctacctctgtgagtgctagtaaatctacctctactagtactagtaaatctacctctgctagcgctagtaaatttacctctaccagtactgccccccactgtttccttttcaggcattcagctcagtctacggcccgcagacagatttcctagaaataactgctcctacttctcaactcttaacaaaaaggtctctgaaaaggaatttggaggaaacagactattccagtgaatagtgtacaagcctgggagatgcggactttggtgtaaaatgaaggtgtgttcaaagagcaaagaaggagttcgggttttagagcaaaaagctcctgccctggggtccccattaggtccatgtaggcaaatgaaggattgaaacgtgcttagttctgattggttggtacagctgggccctgatgggttggtttccaagccgcgaaccggaagtctttgttagctgtttctttcaaacagtggtggggggcgtgaggggcgtgcggggcgtcgggggcgtgaggggcgtgcggggcgtgaggggcgtgaggggcgtgcgggcgtgaggggcgtgaggggcgtgaggggcgtgaggggcgtgcggggcgtgaggggcgtgcgggcgtgaggggcgtgcggggcgtgcggggcgtgcggggcgtggggggcgtgcgggcggggaggagggtgggggccgctctggctacagtttatcttggcactaacaacggggactgattgggcttcgttgtgaaaaggggggccctgtggtgcgtttacagagtctgagaacacagagttcgtggccactccctcacccagccctgggcaccaggttatgttttaaatttgagcacctcagccatggggaaccccttttgtttgtcagccagggcatagtttaccaatcccaaatctgtaatctctctcttaacaaatcactttctacccaaatacagatccttaagggcagggcctctggttcatttttgtcatctccacctagcggagagcgcggcacacggcaatgatacgggagtgcgggggaagggaagagtgtggtccctttaaatgatacagaagggaggtgctgggtagaggggggcgtggtccccggctagggctccacccccccggacctgggtgaggacaggcacttctgccttcttgccccaatgttgcattttccaagaccaccctggcccgccatgcccccattctgagcctataaaaacccgagaccctagcagggcagaggcagaaactgctggatgctgagaggaacgcatcagtggaagaaaacaagcggctggacgtggagaggacgtcaagggagcatgccggcggaagagcacaccacagacgccggcaggccaccgagcggcaggaccaggcggagtttggccggggcagtcggaggagagctaggccactaagcagctcaactccaggagataaaccatctcccttgtggctcctccgtcggctgagagctgcttccactcaataacactttgcactcgttctccaagcccccgtgtgatccgattcttctggtacacccaggcaagaacccaggatacagaaaggcctcggtcctttccacaagtacctctacttgaggtactcattgacctggttaacacaagctgcctacagacgccaaaactaagggcaccctggaacacaggcttcagctgtaaacattcacccctgggcactgccgtggggtgggagcctgcctgagtgtatgctcccctagaggtttgagctgcggggcactgaagaagtgagccacactcccatcgcacactgcgagggggacaaaggaacttttcctcttttaactggggcctcatctggaatctcggaaggtgaatgtctgccttcgaaaaccctaccacctgtctttcttgtgggtaagaggctgttttcctttcatctcttttttctctctcacacggtttaaaaatggctcttatctcctttataatgttaagagttttgctacaggctgcggcaatgttactaagtagaatgagtatttggctcagccgccaaaggtgcaaatcagaccaatttttcctagaggtgccatgtatgcctctacctcgagagccgcaggcacacacggctctgggcacctctccttattcttccccttcccagctcgggcacctgggcgtgcccacggcaggcaaaggccaagcccaacagccacgaaccgggcgggaggaagccgagggggtagccgggaccctacagggagcgcgttggtcaagtgtgccaagggaacctttcctcccctggccaaggaattcaacctggtctgaactggggaaaggatgggaaagttataagaattagagggacgcagttgcactaagcaaggggttcttcccccagaatctcccccctttttgccccttaaactgtttttctcctttttccttttttttattattattatactttaagttttagggtacatgtgcacaatgtgcaggttagttacatatgtatacatgtgccatgctggtgcactgcacccactaactcatcatctagcattaggtatatctcccaatgctatccccccctccccccaccccacaacagtccccagagtgtgatgttccccttcctgtgtccatgtgttctcattgttcagttcccacctgagtgagaatatgtggtgtttggttttttgttcttgcgatagtttactgagaatgatgatttccaatttcatccatgtccctacaaaggacatgaactcatcattttttatggctgcatagtattccatggtgtatatgtgccacattttcttaatccagtctatcattgttggacatttgggttggttccaagtctttgctattgtgaatagtgccacaataaacatacgtgtgcatgtgtctttatagcagcatgatttatagtcctttgggtatatacccagtaatgggatggctgggtcaaatggtatttccagttctagatccctgaggaatcgccacactgacttccacaatggttgaactagtttacagtcccaccaacagtgtaaaagtgttcctatttctccacatcctctccagcacctgttgtttcctgactttttaatgattgccattctaactggtgtgagatggtatctcattgcggttttgatttgcatttctctgatggtcggtgatggtgagcattttttcatgtgtttttttggctgcataaatatcttcttttgagaagtgtctgttcatgtcctttgcccactctttgatggggttgtttttttcttgtacatttgtttgagttcattgtagattctggatattagctctttgtcagatgagtaggttgtgaaaattttctcccattttgtaggttgcctgttccctctgatggtagtttcttttgctgtgcagaagctctttagcttaattagatcccatttgtcaattttggcttttgttgccattgcttttggtgttttagacatgaagtccttgcccatgcctatgtcctgaatggtagggcctaggttttcttctagggtttttatggttttaggtctaacgtttaagtctttaatccatcttgaattgatttttgtatcttttttccttttctaagtgagagggctcccctcccaactctgtttctgatggggaagttagcagaggaccagcgacccctgctggcggagagctgcaaatttggcagggcacatttgagacactctcaacagatagaaccagcctctaaaatatcttttcagtcccaaactcgattccaagcttcaggctgaggtcttagaaagaaaaaacaggtctgagggatccaaagccagggaacaggcacaatgtaaatgggtagcaccaattcctgctgactaaaccccccaccctatggaaggaggccatgcttcatggcataaacaggcccagggaactgaaggtttgccgacagcagggagaaagggaggcataggcaagggcggttcgttcctagtctccaggttttccctgcttcatgggtacataccacattagtacccatggctggcacctgccaaggtcgccagggctcagggataaggagtggagactgaaaggatcatgctcgctttctctctccatcacaccctgagttttcgctgaaagaaggaagagaatgaggggcttctctattcactgtctccagttctcttcaacacccccagtttatactcctctgtagtgtaccctgaaccatcgggactgctttgaccctcagaatctgcaggagaaacacctcagagccctctgcacaaaggtttggccaaattatgaaggactgggttggccctaggaaggaatcattcatttccataccattcggctgttgagacttttctgtagatgtgaggacagatggcctgaggccccgtatgtgcagggcctttctataccttgcaaggaaatccagaccttgccgacagtgtaggattcatccagccctcctgtttgccatctcagagaaggctgcaaggggtaagcccagggaattaaagatacgagtcctagaggcaccccggaaagagaggccagctccctcaagccctgctcctctgggtccaccccgacctccctatccagcttcagcctctcacttggcccctcctacaaattctcactctaaacaagccccagtctcactcttgctcctccaacagatgcctggtgaatttgggccagcaaggtccaggtccccttctccttacaggacttaaagtaaattaaggggggatctgggcaagttttcagatgatcctcataggtatatagaggctttctagaatttcaaccaaatagttgaactctcctggagagagacgttatgttacttttgaatcagactgtgatagacactgagaaacaggccactctacaagctgcagagagatttggggatgagctttgcatcacatgtagcatcaggaaagggggtgaatattatccaaccggaagagaagcagtaccagtgaatgaccgtaaatgggaccccaatcatgagatggaagccgggcggaggagacactttcaggtgtgcgtaatagaaggcttacgtaagactaagaacaagttgtccatgatcaaccaggaatttgatgaaaatccaatcgccttctaggaaaggctaagagaggccttggtaaagctcacctctctctctcctggttcagttgagggacagtgaatcccaaagcataactttattactcaggcggctcctgacatcaggaggaagttgcaaaaactgggccattggaccagatagtacattagaggacctcctaaaagtggccacctcagtcttttataatagagacggaggcccaggacagtgagaggagacacaggaaagagacaaaagcttcagtggccaccgtgtacgtccacaaaccccagaattcccagggtgcacctgttaactgctaaagatatggcaagaatagttacttcattctaaagtttatttgctcttgtacaaggtttaatttcttgcaccaggggtgaaacagctcagggtgcaactttgctgttagtatatttcacttcttatctttgtgatctttgggagtacattctttctttttataacacacatgtttaacccatgcatacttaaccttataaaacctgggtttttttttttctctcatgcctagaaccatcaaactccaagtggacaggcaactggagcctcagataatgactcccctttgctaggaacccttagacagacctctgggaggaatttgactgccgttttctcaaaaacaacgccccctgtcagcgggaagcagctaagacaggtcatcgtccatattctaatagcagttagatgtacgttttcagagaggggaaatgatacaggagtgcggggaagggaagagtgtcatctctttaaatgatacagaagggaggtgctgggtagaagagggtgtggtccctggctagggctccacccccacggacctaggtgagggcaggcactttctccttctcacccaaatgttgcattttccaagatcaccctggcctgccatgcccccatcctgggcctataaaaaccctgagaccctagcaaggcagagatagaagctgccggatgctgagagaaacacatcagtggaagggaagaagaaaagcggctggacatggagaggacgtcagtggagcatgccggcggaagagcacacccacagaccctggcacgccggcaggccacgtagcggcaggccacgtagcggcaggccacgtagcggcaggccacgtagcggcaggccaaggcggagtttggccggggcagtcggaggagagctaggccactaagcagctcaactccaggagaaaaccatctcccttctggctcctccatcagctgagagctgcttccactcaataacacttcgcactgattctccaagcccaggtgtgatccgattcttctggtacacccaggcaagaacccaggatacagacagccctctgtccttttgataactagagggtctcattgacctggttaacacaagctgcctacagacggcaaaactaaaagagcaccctggaacacacgcccactggggcttcagctgtaaacattcacccctagacacggctatggggttggagcctgcctgtctgtatgctcccctagaggtttgggcagcagggcactgaagaatcaagccacacccccatcgcacaccctgcgagggggacaagggaacctttctcttttcagttggtcttaataaacactgagtaaatgaatgattacgcactcagaaaaatcagttatcctctcccactccgtgcctgggaagtaccaacgggtactgaaacgtaatgagtaatgtctagagattttctccacaggatagaaacaaagctcaaagaggcagcaagttgaagaaagtgtgacactgttttatttttaggattttttcctcttttttaaaataaatatacgtgtagagagacagggtctccctttgttgcccaggctgatctcgaactcctgagctcaagctgtcctcccacctcagcctcccaagggctgggatcactggcatgagcctctgcacccagcccttaggatttttttttcttttttaaaattttaattattttatatatatttttaagttccagggtacatgtgcaggatgtgcaggtttgttacataggtaaacgtgtgccatggtggtttgctgcacctgtcaccctgtcactaggcatgaggaccagcatgcattagctcttttccctaatgttctccatgccccctggcccagccctctcccaacaggccccagtgagtgttgttcccctcccgggattttttttcttaaggaaacacaccacatcaggcgttgaagtgagtgtattgactgtctgaggtttgtgtgcactttttaaccagaagtcatggctggggacacaaaagcacctccttgcctatgtagttttgttcctttactgctttaaacaagcaagatgtggtttgcattcctttcgctgctggtgttgttggctttgtgtttctcaacagaaataacttgccttgcctttgctctcaaggttgtgaaagccccccacccccatatgttccttccactcatttgtcaccgagaccctcagtgttgctatctgtgcataatgtgtgtgggtcgggttgtgtcaagcatcagacgacgtcggtacctctcctcactgtgaaggatgaccctgtacacaccactgctctaggcaaggatgcgacccaccgtcccggggttaaccacatcagtgtcaccatcacaagggggtgacagccctttacagattacatctccttttcctggtgattctccctcttaatccctaaatgagtcctgcaagatgggtgttgattcttcctatagcacagctgaaagagttgaatggctcgtcctagagcacacagtttggcagggctgagtaaaatgaaacccagtgcttgtccctccaggctgcggcgaacctgcactagagttttatgaaagtccaacttcctggcgataggcagaaaaagcaacgatcaccttccctgatattttcacctagcagacagtcttcagcccagagaacatcttcccaaagtccaagacagaaggtacatgtagaaatgaaatagaggttcctcttcaaagggactttcctcccagtctaattcagaatagatagtaacctcttctagaagcaaagtttactcaaagacctgtgttaatattcttaaattctgctagctgtaataaagaaatcaatatactctgttcttagctcccacattttagtctaggtatttgccctggcatgcctgaaccagtccaagcaagaattaggtcatagcctcttcctcttccttatttggaagtgtttttgcctctctcagcattccacaagttacttcctctcttcctttgttctcctctgcctttgcctcttttgggaagttctaagttgctagccaatcgagacaaacagaatgtaaggtcccattccagccgatagaaactgggcacagcagtagggtagctgcgtcaggttataaatgaccctgtctttttttgtgtgtgctcttgtggcaagactgctagcgagcggcaccctttctgcagaaagtaaactagccttgctgagagatcctttgtctcagtgttgatttctgcaacaccgagcacccgttcccaacagtaaatgtgtctgcctgtgtgtgtacacatccacccatcagccacaaccctatgcctgaagccaggcactagaatgaaattctcagggtcatgtcatgtttcagatttcaagtctcacttcccgcacctgttaccatttgggtctatgtctccctcccagatcatcctctgattctaccagagccaaacccggaaccctctgctcatttcaccctttcaacacacattttccaggcacttctgctgctcagcatctcccaagggtgagccctgagctcttgcagggatgaatgctttccatggcttttctgtctgcctgcagttacaacccctgatctctggggacaggacctgccaggtctgtctggagaatacccatgtgagactgaaactggcttctcccactctcagccccagtgacctgctctgtaaggctggttataggtgtggctgctgcccctgcccaaatgctttaggtttccctcctgggattctcctgcccctctaagcagctctccaggggaccccatcctgacaaagaaagcagaaaatggagttcctgatgagaaaagaactgttctgtgaggaacacaagtccttttacatgatcgggcacagagagatgtggagaggggacaggagtcctgtccttctccctctgagctgtgtgttcatcttcaggagctgcgtgcgatgaccatgaggagccactaactaacaaatcatgcccaccggatgctgcaacctgcaccacgtagcttagcagtgttatttctgtgagccagcgagactcccgacaagcagctttgtgtcggcctgctccatgtcaccctcttttgccttaaaaacctgcctataatgaaggccaaagaaagcaagctcatggccgggaagctcacagccaggcgtacgtgggtgtgagtcttctgggctgctgtcctcaccctggctcaagtcaactctttaagttagacttcatgcctcagcctcttccttttaggtgaacactgatgggaatacaggaagggcccccatccttccctgtctgaagctcagactccgcatgagaggacttcccactccatctcaggatggagacagcctgctgaggatgcagctttgtccaatgaggtcaggagggctggtggcagcgtctgttaattccgttggggcagccagtggcaactggcagttattccagctgaggatgctgggatggattttttttttttttttttttttttgagacagggtcttcctccgtcatccaggctggagtgcaatggcatgatctcgactcactgcagcctcaacctcctgggttcaagcaactcttctgcctcagcctcccaagaagctgggattacagacgtgcaccaccaagcctggctaatttttgtattaatagagggtttcaccgtgttggccaggctggtctcgaactcctgacctcgtgatcctctgcttcggcctcccaaattgtggggattacaggcgtgagccaccgcacctggcctgggacggaattttaagtgaactgcggcccttagctcatgagcccagcttcggtgtctgatgaaacgacaccgcagggatgggggagaggggaagattcgcaggtcacgccgaaacctctggttagccccggcttccacatccttcccaaaatctttagcccaagtgccgcacagccccttttgcatgtcttccccactccttggtggcagaggcccctgttggtaaagcaacaatagagaagtggagaagataaagagctgtgaaaactgccccagagaagctgcaagaagctttgctggaatcaggttttgcatctccgaatcggagctccatttgttgggtcggggaccatgcttagtggttcaagaactgacagaagaggtgtttgcaaaatgcttgttgggaggataaacagctaaaggaaattttatctgagcctgagaaccgcctgcaccagcacaaaagtaaagccccagcgccctcgggccaggcctgctggaaaaattcccatgtgtcagccccaggaagacgtgggcaagatgaggcgtatcctgaccaacgcaggaaatggccctgctcttctgctggcccctcttccaccatcgaggccgctcatccaagcggcgggaagtaagagggtcaacttttgcacggccattgagaggtttcctggaaacctggctctctccccaccgttgccccatgagcatggtggtgacgagcttgggctctgagatcagaaagtctcaagtgtgaaacctcagtcttcttccttattagctgtgagactttgggcaaattacttaacctctctgaaccttagtttcctcaaactgtaaaatggggcaaatgttgggtgacactcagcataacgtcagaaatagtgcccaataaatgttgatctcatcggccccacagcccattccgccactctcttctttctcttcctccccacaacccaatttcatcattgcctacaaacagccacaggatagaactcgggacagttcgggacagctctggacagcccagaggttatttacaagtctaagagcaatcagtgtgtcctgcccaactgcccagctgtttgaaaagcacagtaagaagctggtgctgtccataagccacatagctttctaggaatgacaggggtgtggatttacaaagtcactcttgaccctttaaaataacacaactattttctgctcccaccatatctcaagtggcacccagattgtgaggccttccatccagtgagtagtgtcagctggagaggtggtgactgatttagggctccggtttagggctgaaccagggtcagctgcttctttgtgtgttggtccccttctgcggaaagcaaagggattggaccagatgatcgtgaaagaaccttccgatgttaagatgtagagtttcgatggttccatgatagagagggatcacagaaaagctccacaaagcttaacctcccagggggacaattacaataatgtgaagttaatgctaacacaggatagtttgatgtgggtgtgacggcatagggaggtcgggggcctggaggcttctcagactcattctcagcaccagatgtggcatcaggaacagcctgaagggaggctaagggatcccgccctctccccagctctgaagatgcctccacagtgaagaagagacagggagcccccaactctgcactttcactggctactcccacactgcggggcaggggaggaggaagaccccaacacctcccaccaccgctacagaccccgaccaaacgtcagttctcacctgcgccaccgccccaaccacccctgagagccattaggtgacagttgtgcttcacccgcaaaaggtcttcctttgccaatttttgtcacaagtttttgcatattgtttgcataaatttgcaggtaggattcaaaaggtcctgattccaattacacaagagaaaacacactgactgcaagtgcagttgaagaaggttctcagaagggcacgctggaaccgctccccggtgccaggagaggtgtttgaactacgtgctgctggggcgcccagacgggcttccccacgatccaggaaatcagagcttttgcaacgttggcttgaaatcgtggctaacaagacagaaaagtgctcttctcaaccccaggggaagactggggaggtgggcggggccccagggcccactgattccatccaagagggggcatggaaggacagcggcgagcccacgtctggagcttctccctcctgtgaaaggcaaacagaatcctgagatgccaaactcactgttccaaagggaaagggaaagcttggaaatggcgtcacgcaaaacctgcctctcaggagaaccagtctgtttctgaacagagagcttgcaagacggccggccatgtatctccccgggaggcctcccacactctgacagtgtcgatgagcagctgatcctcgcgagtgtgggacaaaagactagggcttgcttttatttttgttcagggacacagagccaacaccaccagctactaaaggaataaaaccacatcttgcttgtttaaagcagtaaaggaacaaaattgcataggccaggaggtgcttttgtgtctccagccgtgacttctggttaaacactcgagaaaaacacaggcttggctttttcttcttttctgtgtctactctatctgacgtcagatgcaggtttgctgagtgccaggtgagtgcctaaagggctgttcccccacctccccctttcacttgcaacgtgcactcagtgcgtgctaattaaagcctcccaggagcctgaccactggcctcattgcccacccaccgtcttctctctcccccttccccctgccctctcctctcctcctcttttaaatactcagcacctcaaaatgctctctggaaaaggcctggccacaggtcctgctgtgactggtgccactttttcctgggcagattctcaaccttggcatcataaccctctaagctgactgagacctggctcagacactttcagttttgtgctccaaacactgagtggtaactttacccagaagttcttagattttcagccactcaagccaggctctgatttccaaaataagtccagatctagaacagtttggggaatgaagggatctggctgagagatgggagttggaacagttgcgacaccgtcagcctcacatgaacagaaacaaattactcaaacaagagaagagcaaggcccaactggaaaagcatgtgggtgagtctgcaaaccaaaaaagtacccgacccaggcctcgatcaatggagaagtttattttgccaaggctaaggatgcacccaggagacaggtctgtgcctctctcccaagatgatgttgaaggcttcagtcaaggggaaaagccggctggagggggcagagggaggagggtgtggtcacatgactgattgctccatgctgcaggagaaaaggagcaggtgggaacagtcagttacctgtttatctcgtgctcagtaaattggcactttccatgagataaggggcacacagagcagccactagtggagatgctgaccctctcatctgcagctgtctgcttagggcaaagggaaaggcagcttcctgcaggactcagctttcagcttttttcttcttggttgagtgaattggggtgtcgagtttttaatcttcctttcacaggtgctgacccaatgaggccaatcatgtgtgattgggaccttctgagtgacttggtggaaagcagggcccaaccctcctgcccaggacgcttgggaaagccttgctggctggacggaggggaaggaggctctcggcgactgcccccagaggggagtggctctccactggccacagcgatggctggagtgagacctgagccccggaaaaacacgaaggtcccaaagccggcaaaagtagacactgagtttattatttgccagacaaggggaggcttccatttcattacgaaaggtcaggagtgctctctgagctgaaggtgaacagacagctgcggtgtaggaaataggaagttttgtccacagttctgattggcggaaaaagcacattgtaaactctctgaggatcgctcctgttccgatttgtgttgcagaagcaggagcaccgttcctggaagaccgtggcaggtgtggtctgggctgcgtggccccggagcctgctgtctgagcctcttctcatggagtgggggtggtttctctggcacctacatgggttaagagggaggacccctggggccttgcgcccatcaccccctctcatcctcactgcctgtgacggacagacaagcagctctcccagctgcagagacaagatgaccacaggagagccagcagaggatgctgttaccagggagctaggacagccagcacacaggcagacggaggcacgcagcctgagtcccagtcagctggaggacatgtgattaaaatgctgctgaatagggaaaaaatcccgggcccagaagttgaggtccctgtgggtggggccgtggggagggggtgcgacccaggccatgcccaggcttgtgatttctgacctcgcgctagtgcatttacgggtaaactgaggctgggagggaagcctctctctgtatggggaggtggtcctctgtccgtgtccgtggtgaggggctgtgcccacccgctgcctagagaggagcaccggtgcttttgtaaagagcagtataaatacacttccgttcagataaaacacaataaataggtggcggcaatggcgggacggcaccacacctgctcaggcggccggacgcacactgcaggagtggctggcgagaggccagccgcagggacatgaaccgaggtcctgttgtttgaggtaaaaatgtatagaaacggttccttgacagcgaaatccccgcttgacactcagatgggcgagcactggcaggggctctgggcctctgcctgcaagaccagaccgtcactggggctgtggctcagaaggactcagaggtggatggatgtccctgcccgaaccagggccgcagatggccccacctgcaccctgcctgatgcccaggcccgggatgccctaggctgggcccacctggacgtccagggtcagttgggggaggtgctggggtcccgccccacctggccaccccagttgctgccgggcagccgcggcctcagcgtgtcctcagccgcaggaccctggagaggggctccttggcgctggagtagatgaggtaggcaccagccgtggtgctgaaggcctcccagtccctgcagccgacggtggggaggctgtgcaccgccacgaagccctcgtagccctgccacctgcggaacagacagcggcagccgggtcagcctgggctctgcggggcagctcctctcccccggctcccacccgcgctgtcagggacccagcagctctgggtcacatctgagcctcttccatccccccgactggcacagcgtggggagatcgattctgggccatgagggccttctcatcttgcaaagcaggaggctgaggcccagaagaggaaagattccagatctcaccaagatcccagcgctacctcctatccacccaagatcctaaccccggggacccccaaacgtgcagttccgagggtcggcctcaatcgtgaggtgcgtgactttccccagggcccccctcaaacacacgcaggccaccacgcaggctggaacccctccgtcctcagatacaggagcccagctctctgcccgctgctctgcggccccacgtcaggggctgccccaggccctcattcttgctctgggcggctgctggccgccagggtttgccttcaaaaggactcatttatcccaggagcttccatttccgaggcgtggagtccccaaggcagggcgccgacatcaaagggcacgagttgtttacatttaatattaaataataaagtatgaaaataaattcttccagactgctttctggaaaaaccgtggtggcttctgctctcacgggaaagggcagggtggggtccccctgggatcccccaacccactccactgcccatctttaacacacttccaaacaaatgggggagaacctggcagggttttgctttgaggacaaatcccttataatgtttattcacactgttcatcttttcttctaaaaattcatatttatatcttttgtccatttttccaaatttaaagacacattttttattagtttgtaagggttggttttctgtcgtgtgtgtggtaaagagtttgtcttttgcttttgaataggatgtctgtttccatagaaagcttttaacacaggtggtcgacccagtgcctttccttctgggcttgtcttcttcatagaaccctgaggttatacaactgccttcagcttttcttctttttcacatttggacttttaatccatataacatttatttttgtgtacaatgtgaagtgggggtaagctttgttttcttccagattacatgaagctaatctcccgaatcatatggagttatcaagtaaaacccatccttttctcattgccttcaaatatagcatttatggccgggcggggtggcttacgcctataatctcagcactttgggaggctgaggcgggcagatcacttgaggtcaggagttcgagaacagcctggccaacatagtgaaaccccatctctattaaaaatacaaaaattagccaggcatgggctaggcgcagtggctcatgcctgtaatcccagcactttgggaggccgaggcgggcagatcacaaggtcaggagatcgagaccatcctggctaacacagtgaaaccccatctctactaaaaaatacaaaacaattagccaggtgtggtggcaggtgcctgtagtcccagctactcaggaggctgaagcaagagaatggcgtgaacccaggaggcggagcttgcagtgtgccgagactgggccactgcactccagcttgggcgacaaagcgagactccatctccaaaaagaaaaaataaaattagccaggcatggttggcccatgcctgtggtcccagcgactagggaggctgaggtgggaggattgcttgagcctgggaatttcagcctgcaatgagctgaggttatgccactgcacttcagcctgggctacagagtgagaccctgtcccccccaaaaaataaataagaaggagatattattaaaaaggtacccaggcccagatggctttataactgaatttaacccagctgtcagaaatgagagaaaaaatcctattcttcagactatcccagtccacaggtgcagttagaaagccctgcagtgtgtatttactgttaggcttcattttaaactggataaagttaagtccccaaaagaaaaccaccgagcaatctaatttcctattatagatgctaaaagcttaaagacaggcaattggaagccagtggcttattcaataattctgcatcatcaccaagtggcatcgggtctaataacgcgaggagatgtctcactataaatcatgacatcaacagtaaacatagtggaccgcaccacgcactcacagatgccaaaggagacctcagccctggcccggatggcccacagcccatcaaacggccatgctcagatgtgctcgttaaattagagcaaggtgggacagctgccacttctgccgccatccaagattgttctggaatctttagctagggaagcaagctacataatcaattagaacactagaaatcaaggggaaatgttctttattctcagaggtaattacattcctaagtcccctgagaatctttttaagaaaagctattagaactgattggttagggggcgagaaaatgattgtcatgatgagcagctgcaaatgaaagttaaaaagccaaccccattcgttaaacgtacgatacttggaaaactcctggaaataaatgagaacaccacagtgtctatgagagaaaaattaaatatcaacaactcccatgttaggatgtccacacgccgcatccctgacagaatccaaaggcagaagcaccagcactcgtgggttgtggctacacccggggcagggccccagctcagatcccacacgggtgcagccagcgccgggccatccactgggcccagccaatctcggaaatgacacctgacttgggactcgctgtgagccggtggcacctgcgagagaaggtgagcccccggggggaagcaaggctctgggaggaggccggcctcggtgagcccttggggggaagcaaggctctgggaggaggccggcctcggtgagccctcggggaagtaaggcgctgggaggaagctggcctcagtgagccctcggggaagcaaggctctgggaggaagctggcctcggtgagcccacagtggggaagcaaggtgctgggaggaagccggcctcggtgagccctcggggggaagcaaggctctgggaggaagctggcctcggtgagccctcagggggaagcaagactctgggaggaggccggcctcggtgagtcctcggggggaagcaaggctctgggaggaggccggcctcggtgagcccttgggtggaagccggccttggtgagcccacaggggggaagcaaggcgctgggaggaggccggccttggtgagcccacggggggaagcagtgtgctgggaggaagctggcctcggtgagccctcggggggaagcaaggctctgggaggaggccggccttggtgagccctcggggggaagcaaggctctgggaggaagccggcctcggtgagccctcggcgggaagcaaggctctgggaggaggccggagttggtgagccctcggggggaagcaaggctctgggaggaagccggcctcggtgagccctcggggggaagaaaggctctgggaggaggccggccttggtgagcccttggggggaagccggccttggtgagcccacagtggggaagcaatgtgctgggaggaagctggcctcggtgagccctcagggggaagcaaggcgctgggaggaggccggccttggtgagcccttggggggaagccggccttggtgagcccacagcggggaagcaaggctctgggaggaagccggcctcggtgagccctcggcgggaagcaaggctctgggaggaggccggagttggtgagccctcggggggaagcaaggctctgggaggaagctggcctcggtgagccctcggggggaagcaaggcgctgggaggaggccggccttggtgagcccttggggggaagccggccttggtgagcccacaggggggaagcaatgtgctgggaggaagctggcctcggtgagccctcggcgggaagcaaggctctgggaggaggccggagttggtgagccctcggcggggaagcaaggctctgggaggaagccggcctcggtgagccctcagcaggaagcaaggctctgggaggaagttggcctcggtgagcccttggggggaagctggccttggtgagcccacagtggggaagcaaggctctgggaggaagccggcctcagtgagcccacagtggggaagcaagtctcttggaggaggccggccttggtgagcccacagtggggaagcaagactctgggaggaagccggcctcggtgagccctcggggggtagctggcctcggtgagccctcagggggaagcagggctctgggaggaagccggcctcggtgagcccttagggggaagcaaggcactgggaggaagctggcctcggtgagccctcgggggaagcaagtctcttggaggaagctggcctcggtgagccctcgggggaagcaaggctctgggaggaagctggcctcagtgagcccacagtggggaagcaaggctcttggaggaggccggcctcggtgagcccacagtggggaagcaaggctctgggaggaggccggcctcggtgagcccacagtggggaagcaagtctcttggaggaggccggcctcggtgagcccacagtggggaagcaagtctcttggaggaggccggcctcggtgagcccacagtggggaagcaagtctcttggaggaggccggcctcggtgagcccacagtggggaagcaagtctcttggaggaggccggcctcggtgagcccacagtggggaagcaaggctctgggaggaggccggcctcggcagctcattacctgtaaataatactgttcaccgagaaggtacgcccatcgaaggagttggccaccaccaggaaataatcttctcccaccgagaaaaactcccagtccagagcactgcaggaacaagtgggtggatattaggacacaacagacatcgccagggaactgggggattggccagaagctacctccaaaatttatagaggaggagccggggccaaagtggggagtgattttctcacagtcacatatgtgttggtctattccaggaaaatgtaaattagttgtttgcttaaaaaaaatttcaaattttattttattttatttttgagatggagtctcattctgtcacccaggctggagtgcagtggcgagatctcggctcacggcaacctctgcctctcggattcaagcgattctcctgcctcagcctcccgagtagctgggattacaagtgtgcggcaccacgcccggctaatttttgtatttgtagtacagacagggtttcaccatgttgtccaggctggtcttgaactcctgacctcaagtgatctgcccacctcagcctcccaaagtgctgggattacaggcatgagccaccatgcctggcctcaaattttaaattatggtaaaatacatataacataacatttcccacctcaaccatctttaggtgcacagatcaggggcattaagcacattcatactgctgtgtggccgcccccaccatccacctccagaacgccttcatcctgcaaaaccgaagctctgcacccagtaaacatcaccccctcccccctccccccccccccccccccagccccggcacccaccacgccactttctgtctctatgaatttgaccactctagggacctcatatgaatggaatcgcacggtatttgtcctttgtgtctgccttagctgagactccagtgactcaaggttcatccgtgtcgcactgtgtgtcagaatcgccttcctttctaaggccgagtaacgctccgctgtgtgaatggacacgttgtgtttgtccatccgctgacagacacttggggaatttcctccatgtggctactgtgaatgctgctgctatgaacaccggggtacaaaagtccacttttaagaggttgaaacaatcagagaaaaagtctcaggctgctggtgcctgctggaggcaggagcttggtttcccgctctggacactgtgcagaaatggcgtcacagtgctgtggcctctgtgcctggtttcttctctcagcattgtgtcttcagctgtgaggtcagcggccgtgaggtcactccaggaggtgcctacaggacctgcaggacctgctcgttcacagatgttctcctagaagcagaagctgtttcttgttgcaaacaaatttgctgtgtcctgtcttaggagtctcacctgaatttaccaaggatgcatctgtgcttggggatggctcggtttgaggggtctgaggagcggctcccctggatcctttcctccccaggagcccacctgccgagctgtcagcgtcagccccacatctcaagatgaggaaatggaggtcgaagccatgcacacgcaggcgtcctgctgacatgcaggccaggcgggtgcctctgtattcagcagcctcagggctgtggccagttcaggcagcagaggggcctcatcccggtgcttccctgcaggcagttgtggggccggcctgcagcaggggctcagacagggccttgggagagggagggatcacagaggtgtccagtgacaggcagggcgggcagagcccatggggccttgggctcctcactccttcggtcagtcagggtgacatctggagccacctccattaatggtgggttatgatttggttcccatgcagcccgtgccagctcgctgggaggaggacgaggacgcctgtgatcacatgctctggtctggaggcacggccgcgggccccgggtcagtgtgaatccgcggggttactcctcagtcggatctgagctctgaaacccagacccgaggaagacaagcggccacgtcggatgtaccagtggtggaagatcctgtccggctgcaccgaggctcacatcagaagccggcttcggtttcaccacaaaataaggcatctagtgcccgattctgcctccaaagcagccctgggtcacactcgctgtaggacagatgttattcttcagaatcacgccctctggcaaatgcccatcatcggacaaatggacggatgaagtgtgactcagccatgagaagggggatgctctgagccgcgcggccacaccaccaacccggaggacacggtgctgcgagaaaaagccaggtacagaggccacggctctacgagtccatttctgtgcagtgtccagaacgggaaatcacagagacaggaagtgggcccgggggtgcccagttgggagggaggggctggaaaagggtgtggggggctccttgtgaggggatgagaatgttccagagttgtctgcagccatggctgcacatatctgtggatttaatagaactactgaatctaaaaagcaaacacaagcgaccatttgaaggcagtcagagccaaggttacacacagaagccacaaaacccctcagcgcccttgaatagggttttggacttggtgaggccacatcacgtctccgggaagtgtagggaattccccatgctgggtagaagggctaggagtttgacttgtgtgtgctgttttgatggtaattattaaacattaccttaattaattggtaagtactttctgtgtttcataatttagttcataaactgtccataccactgtccagtggtgacagggccataagtcgcgagtgtgtagctgtgttctgtcagttcccgcagctttcaaatcccgaggcgtctgcctcatctgtttctagactgggcatcatgtccatgactaatttttaatcacaattcattctccaacttgtcttattctaaatgttgttctaaaaagcctaatgtttgttttgttctcggcgttgacattggatggcgtggattcgtgctggggacacacaactgccaccgccgccccgtgcctgtttctcctgccatggctgccaggccacgcaggggccacggagcccacaggcaggtcaccccggaatccccagtgcccccagcagacaccgccgctggctctttttctttattatgagtgttctttttttaatttttaaaaatcatataagtaagatattagtaagttaacattgtcatcctttgtaaagccaggagttcagaagtaacagggcaaatagggaaagtccttcctggcctgtctacatacccctgcagccctcccggtcctagggtgactgctgacggagagggcactcccttcccgagtcttctctgcacgtccgtgggcacgcacagctgagcggcacacagcagcccggctcgctcctccgcactggggacacaagatttcactgcacctcacccagccctttccacagagcagttcatcttggagactcttcccctcgaagggtctaaaggtatgtgttgttgtgtgtctcaagctgagattagagcccagtgcccaggaggggcaggtgaattgttaccgaatgaaataggagtgcatgaaacccgaggaaacctgggaaagccgcctgctccatcccaggatgggaatgggccagattccagctccaagcttgacccatggcccctggctctgggatctgggtaatacggattcgattgcaggtttattcacagaccggaattccaccccagaggacgccccacactggtcaggatggttgtggattctcagtgcccactgtccaaaatgtggtgcccacgcaacctcctgtggctccacggagcgtgtcggtctggaaccatcactttctcgtacatacagacccaccctccatgttccctggatctcacatctgtctcaacaggccagtctccgtgtcctggtgtttgttgtcggggaggatgcaacatcgggggaaggaagtaatcatgtctggtggcagctggcactggcaggcagcgggcactcgaagcctgcacctcgcacctgtccctctggggcctcggctatccctccgcacgacgggcatgaagccccctcctgcctccactgctcggatgaaaggaggtaatgggtgtgaaggggcagaactccgcacacagcacccggctctgggaaccaaacctgtgtctcagggcggcactgacttccccaggccaggaaagtccccaggccattctttccacaggaaggtccccaggccattctttccacaggaaggtccccaggccagtctttccacgggaagggtggtgaggatgagcctaacggggattccgacatggtgggcctcccagagatcagcccacctcccactggcctgtggaggcgcatacctgcaggtgagaatgtcctggaacttgacaaaggcctgcgcggtcacgttcagctcgtagatgacggagttgatgacataggaatcattctggacttgcatctccacatcgtagctgtgactgtttgccacagcgaggaagatcctctccccgatctggaagacctcccagtctgcagcaccgaacgtctaggaccaaaggagagcaggtgcagaggtgtgggggagcgggcgcagaggtgtgggggagcgggcgcagaggtgtgggggagcgggcgcagaggtgtgggggagggggcgcagaggtgtgggggagggggcgcagaggtgtgggtgagcgggcgcagaggtgtgggtgagcgggcgcagaggtgtgggagagcgggcgcagaggtgtgagtgagcagcactctccctggctgtccccagggctgccacttggcaggacgtgggatcttggcacagcccagtgcccgctgtgctccaggtgccagacgtggcactcctgctggcagcctccttggccacttctccctgaatgttagtgccagctgtgcccagccctgcccctagcgaccatctgtgtgacttgcttctcagcaatccatgccttctcctactccaggccccagtgctgtgcgtcctacgagcaccacctgctgtctcacctcttccaggaagcccaccctgatccctctagtcccagcctcagacactgaagcaacatcaggtacctctcgagttttctcttacacgctttccctggccttgcagtttggctgagtctttcctctggctctgtagacagaagccatctctgggttcctgtgcttgccattcctccataaatcacttaccaccgtcaagaggcaacaggtctggggctgcacacggaggcccaactgcggcacctctgccaccaaccttgagctgcaggactgtctgcatgtggggtccacaaggcggaagcttctgccagcaccttggggataagggtggtggggctgcacggggaaggggaaggctgcttccctggggacagtgtccccacaggccggggatccctgcgcacggtcccaggctgtcctagctgaggacggagccggtcatgctgcggggctgtgtctcttcctgactcacccccgtccggagggccttctgcctgagggacattgcaccaccgggccaggtaagaagcagctctgagagcctcccgtgacagcaaccactgggacgttttctatttgcccaaatcgaccagcaagggcccggctcagacgcccctgggtctgatgcgacctgccctccgcagcaggtcaggcaccctcccttgcttgtatgctcaggacggggctgcccaggcatcttctggtccccctgactgtccggcgcctgcccggccggctcaggtgctgcaggaaagagaaaactctgggcccaacgtcaacgtgcgttctccacgcccagcagggggcgccgttgcccgcccgagcccggagagcctgggctgcaggggagggcgccacaggtgaggacacagctccgtgggcaccaggcaaggtcccaaagcagatccgcagccggtcagaggagcgcacatgggtgagcttaagctaagaaagcaagactcactaggcaaggacaggggcccaggacacctggcggcgccgaaccctcggcgggggcggggccgggggctggctgaggctttcccgggtcagcgcgccctcccctcctgcagctccacgagatgtgactattcctatctgctggagaacagccgtccagggccaccccacgtccttcaaggggactctgagacactctgggccggtgggaccttcagcagcatctggactttggctgcctcacaggtgggcgggggggagtgttacacacaggccagttcactgactcagcagaagagaaacaggaatcatcagactgttcaaccctgggctcctcccacgcctgtgctgaggaaaccaactgagtgggcaaccctcacgtgtgtacacatgcctgcacacacctgcacacacaggcccatacctgcacacctgcatgtatgcatacatacacaaacatggatgtgcactgtgcgcacacacacatgcacgcctgcatgcatgcatacacacacaaacatgcatatgcactgtgtacacacacacatatatgcttacatttttacatgcacagatgcacatgcatgcctgtacacatgtggatacacatgcagatacacaggcctgctcatgtatacatacacatgtatacctacacacacgtatgtatgcatgcaaccatgcatctgtgtccatgtgcatatgtgtatacttgcacacatgcctgtacacaggcagatccctgcaggcacacccatgcatccgcctgcatgacatctacacacacacatgcacccacacagcacagctctccccacattgctggaaaagactgaggacacacgcctccagccctgggcgtccttccagtggagcccctgcttcttagctacttgctgatgctcacctgtgttgaggcagatcctgatggactgccggggccagaacagcctgaaactccctctcagggaaaggcccggagtgcccgccctgtagcagcccagggtgatgggggaccccgagctggcactcagcactgtgtagagagagctttactgcaagttggggctgagccgggcatcacatctcagtgatgagtgaggtgccctccctgcccaaaggagccctggaacgggctgctgcagatgggggaccatggaggggctgcccggggccttgggggcacagaggaagagggcccaaaggcatggaggacggacaggggagttggcagcaggaagcagggaagggtatccaggcagaaggaactgcaggacagacacacaggactgagggagccaggagggctgggcgcacacagagtgcggagcaggggctggggcgggcctacagggcctgggtgctgtggaaagcagctgggcctccaggcaaaggtcactggggagccggaggaggcttttgagcagaacgaggaggtcagatgtatgtggacggctctgagacccacaggagctaggaaggtgtcaggagagaggtgagccaagtgctgtgggggtggggtggggtgggtgccactcctaagatgggaaagaagggtggtggtcttggagacaggcttctggagacccctcagagaactcggtacatccctagggatggagacaggggctttgggagaccactcagagaacctggtatttccctaggcatgggtggcacacgggctgctgtgtgagccctggggaggggcaggtggcaggagcgtagggtggaggtggcggtgctctggccacagccctgaggctggtggagaccctgggttgggaatgcgcgagacgggcagtctggtctggtgggacctgtagcactgcagcctgcctccagggcagggattgtgcccacgtttcatggggtggcagggagcaaactttgagttgcatcttggttggagcccaaggtggggcgtgtatttgttccaggaagagcacgtgtcagctgtgggggtgggcatggaggtctgtccagggcatggcagtggccggagtgaatgctgtgtggtcacctgcctgggtgctgctacgaagcagagctcttgctggagtgcagggccagacaggcctggggggccgggggcggctcagaggctgctcaagtcacccttctgttccctgtacccagcgagggtctgtgcaccagatttagcaaatccagggtccctgttcaatctaaatttcagacaacgaatgattctttagtctgtgtgtatcccatgtaatacttgaaacatactttggcaaaaagaaaaattagtttatctgcaactggctggaggctggcagaacccccacggggtgtcaccggctcctggtcccagcatttagctggccgagtccacggtagggcggtcattgtcattggctattgacagcccctcctccctatgccaggctgtcagaagccccttgcaggttggagtgaacctgtccctctgctgaagccggggccttctcacattcagaagtgaggaggtgccccccaggggctgtgccaacccaggcagagggtgtgcagtgtgggacccccctgtcaggccactcccagattttaagcacattagggactcatagaggagagagaaagaatcttcacatcaaaggccctgccaaaccctggctggcacgggagccaagcgaccaggcacctgctgggctgggcaggcccttcccgccctccctccaatggaattccccagagcctggccctgctgccctggcacggtgcctggcagctcaggagcatcttgctgggatgatggtgcttccgggacttggcagccaggagcacctggagcccccaacagctccctcgagggcgggtgggcacccggtaatcagtggattagttgctgggcaaagaggcccttgggttccggctttgatagggcaaagaaagaggatgcctctgtggtctgggaatgccaggggaggggagggaggcaggatgcacccctggggctccctccctagccaccagaaggcagttccccaacaagccctggttgggggggcagtggcatcctctctgagggtagccagctcaggctggacaagcatcccgggtggccatgggggcagcgctactggatgacaggtgactcccttgagagaactgggctcagcacactccccagccaactcttgggtgccccccgtgctcttcccggccctgcagaacccgcaagcctggcaccttccccaagctgcctaggccactgccagctcctgtgtcagagaagacagaagtcatggggcatagctgccaccttcctggagccctcccgcccaggctctgcccagccccttcaggctgtcctgggcagtgctgacccctcatgccacccccttgacagatgtgcagatggagactcagacacagccaggcctcatgagggtgcttaggggctcctgcctgtttttctaagcaccacatggctgcctgccgggcacctgtccccagagtggcccccactgtatccttgcctacagcacctcttgcccttccatggccatggaagcgagtacacacacgtgtgcatgagtgtgcatgtacatgtgtgttgagccatgggcgggacccttgggaagtgtgtggcaccaagtcgggggcccagctgtgacgaggggtccttactaacatggtggctgctgctggccttgtgaggaccccacatgccgacagctgcaatcacagaagcaccaagctttggaagctgcaacaccttctgaggtctgcagcaaactcacttagaagccaaacctattttggagtccacatttggtgaccgcgactgcacggcctactcctcgtcagctcagggagcaggaccctgtgcctagacttctagggacagagctcactcctcctttggtccaagctggggaggcccagtcattggaggcctggtgtctccaacctggaagaaagttgttctagaattcctggtgggatgggcagaaagactttgagggcaggcggaagaatgggacatcaaaccaccttccccagggtgggcagccagctcctcactcatatctgccctggggctgcaaagtcctgccatgcccaccgaccattcccttggagcactgtacttaacctgcagtgccctgggaatgcgcccaccctgtgtttctgggagaaagtgaggtctgtgtgcacagctcctcaaaccccacctgcaccccacacccccgcagacccctccagaaagggcgcctctctatggcacacacccactttcaaagcatctcggcttcacccgcttcaaagctcacgttcatgaaagacattgcaaaactcaaaccaaacagtaaacaaattaagacatctctaggacctaaaaggatttcaacacaatgtgagaaatgttggcaaaacatgaaagtgggctttgtgagttttgaggaattactgagttttgaaagatgaggctcaggccaggtggagaggaagcccgtccatgtgtgcgtggtcccagcgccttcccagggccctcctaaggcaccttcagggcctgggccatgatggcgcccccagcagccaggtccccgttcccggagttctggttctgctttgggagctgcagccgtgcttccttctgtctgctgtggtcctgctctagcccctgctcttctctgatgtttctttcaggcggatgtcacccaccccttgggacttcgccatgggtcgctagcccagaccctccccttggttccggtggttccatttctgcccctttgctgctggcccccttctgaggatgcccgtgcatctccaggaccactgctccagtccttggtgtagatcaaagctggccttcacacgcggcctgaaaatgtagagtggccgccttctgggctgggctgccacctccaccacatcacccgtgacagaagccccgtgtttttcggtaaccacgttccacgaacacctcccgactgccttccagaacacacaaagatcaacgaagctcagaatccagtcccgacgtcatttcatgaagagcaggtagtccatcaaagggatgggccccatgagtgaagggctgagaccccaccatggtgtgaggcgtcccaggcactcccgtcacggcccaaaccaggctgcaggctccatccccatggggcaggcacagaggaggcgattcatgtggacacagggacacctgtggacgccctggctcggccgcttaccgccgtgtgtttgtggccaggtccctgctcctgagcctcagtttccacacctgtgagatgggtctgaggtggaatcgccaaccagctgaggatgcgcagccacagaccaccttccagaaatctccaaaaggctttccaaaacaggaaaacaaggaaggctgccatcagcaggaattccagggctttcagaatgaggctgtcaggagtgaagggagctgtgctccacatgcagggcagtggccagggctgccaggccttgtttatctgggagcgccaggctgcctgcctgcacctggtctgggcacctgaaggcagagctgctcctgcttagggtctgtggcaactgtcctcctcagtgggtgctgctgggagctcctctgattcctggtgggcggcttctggcctcgcctcttcacccacggtgtagggtgtgggatggagatgcagggcctctgctctccttctcccctcccccaagcagcctgggttgtacctccactaataaacaccaacacccgcgcccagggtgggttcggccacggggcgattctctgagtgacacatcaggatcagcttcgtgtggtcctgaccttacggtaatgtcagcccccagagccaggggccgggctatggcaccacccacccaggcgatttctatgtcgggatgaccaactgtgccatccctggggcagtcccccatgccaggcaaacattctcctttcatgcttaaaatcacaggacgggttcacctgcttcgtccttggacctgtgatctatgtacgctgcttttcaacaagtttctagttgtcccctcctgggtatggccctcccctccttccttcccagaggaagaaaacacaccagctctgcatgcgagaacgctcccagctctcccatcttcccatcgcaggagcccctcgctcctgcaccctggggctttcggtcctgtcccacctcagcggctgctgcacaggaaggccgtcctggcctggcccctgtgtctctgccttcctcgactcctgcagtctgtgcttctgtcactccttcagcacgccatccctggacacactttgtgctccgtggactccacagcccccaaaccccctcttatgccctccctgaccccagaccatctgggctggcttctctctaggacacataccagttctcattccagaactttccttatggtcatctttgggtggagccaccacttccagttctgatcttctcattctggttgagtacctgggcttgccagtgcaccccccaggaacaccgcctagtccagggctcccacaggtctcagactgacaggagactgggtcatatgaccagcactagccaatgagctgtgagtacacgtgacacagggacaagctgggtcatgtgactggcactagccaatgagctgtgaggacgtgagcacaggtccagctaggctgggtcatatgacaagcattagccaatgagctgtgaggacacgtgagtacaggtccagctaggctgggacatgtgactggcactggcccatgggctgtgagcacaggtcaggtcagccccttcctgctgcttcccaccgtgtgtgctccttgtctgacttgatatgagaactaacccaatatggcaggaagccactgacatgtgggagccgtgcatggcagtggccagcgtccttgtcctgcgggggctctgtggacatcactcgccttcagaacactgagccctcctacctcctgatatccagggctgccgatgggaaatcccaggctgccgcggctcctgtgtgctttgaaggtaactttcctttgctctcgcgctccttgggctcagcgccctttcagtctgatgagatctgggcggttttcttcaagccttctctgacaattccatcactgtcctcaccctcttcttttttttctagaactttggttagccagatacagactctcctggtttgattctgtctcttttcattctacattctagaagatactcttaactttatatttcagtcatgttaatgaatgtcttcttttaatgccagcaattgcatttttaatgtccaagctctctgtctcattagtagcattttttatttcgtaagtgcagtatcatcttgaatacttctgaagacaagtataacttaaaaaaattcctttctgtttctagagctagctcagtttctttcagcctttttctttagcctgactcctgcagttttcaggatttttgtcaaacatccggggacccttagctggagaggatggcatgggtgacacgcagctggccaggtacgctctggggcactggggcatcttgagcaccttggtgcagtgtcgtgaagaagacactgtaaattggacttggtgttatcacaggggctttaggatcacggtgttggtagatctaggatgataatctccaaaacgcactccccaacccactgcagggatcctttctcttgtcacctcactttgtgatttagaatgcaggacctccaggacagcagcctctccgtggcacaacagctgttaggagaccttgcctagttgacgagaaagtcacttgtggtgcctttccatccagggtgcgcgactctgctctcaagaccccctggaggcccgccccctgccccccaccagctcattcgttagatgattggaagtgactgcctacgtcttctttcaggataaagcctcaagtcctgcaactattccttgtgtgataacgtttcaaatcccttcctggttctggcaaagctcctcaaacatgctccagtgtgctggggctctgcatgtgtgagcctggggccagcagggcgcacgttcatgtcagggcaccagtatgatcctgatgacacatgactggtgtggagccccgggtgtttccacgggaactgctgtcggccggattgctgtgctctgcagctgtgcccaagtccccaagccaccctttcgttgctgctcgatgtcaccatttgcttttgttgttttttttttgtttttgagatggagtctcactctgtcgcccaggctggagtgcagtggcgtgatctcggctcactgcaagctccgcctcccgggttcacgccattctcctgcctcagcctcccgagtagctgggattacaggtacccgccaccatgccaggctaatttttttttgtatttttagtagagacagggtttcaccgtgttcaccaggatggtcttgatctcctgaccttgtgatccgcctgccttggcttcccaaagggttgggattacaggcttgagccactgcgcccagcccaccatttgccttttgagccactgtccccgcgtatcgagccctccttgggagtcccaatttccagcccatatcacgctcttggccccagcttgcagctgctttcgcatctcaacctcaccagcctcaagtccaactccaggtcaatgattactggtcagaggggccattcctgctgagccctgtggtcaggctaacccatgaccgaaggctcctgaaccctccttcaggtccgctgtccgcacaccagcacgtggccaccagcccaggacacccttgtagtttcccagagtcttagcagcatgcgtgttgtggtgagaggactgtgcagggaccagtaagacaaggaacttatgctcagctctgtcccgtgccacatcaaaccaagtgacaggccgcattgcttggcttgatcccagttctgccacgggcaaagccctccaccgttctgagcctctgtgtccttgtggataacagggaccagtggcagcaagcccctctcaaggtgctgtgagggtgatgtgggcggatgcgggcagagctcttggcacaggtgctctacagagtcgaggctcagccagtgtgagccgctaccaccacctacctcctgaggctgttaccaaggccaatggctggaaggaatcttgctcacccccaatcccagtgcactgagcctcactctgcccccgtggcaggaggctcatcccgcctcttcctggctcccaggcacgctcacctgttccatccacagcactagcgagctcaaggtgtgttccttctggcactgctgcctcctcacctgggcgcctgcggctcatctgggcggccacagcagcctcccaatggctcactccctcccagccaccgaccagtcattatcgtgcagccctgtcaaccccacaagggcaggcttcacgtttcacttgcagcctgtggctctgggtggtgaccctgctgcctactcccagccccactgccctgcaggtaccctcccaactttcccagccctcacttcctcctggtgagggctgggaaagtggggagggtgctccctgacatctgctctcctcgtgccctgaacatccacgtaaagctgcccttccccactggaccatgagtgcccgaagggtggggcggtggtcacctggatgacgctgtgccccagcctgccagagggctgagcacgtgggagtcccggagcaattctctgcacgcattaaggcgtgtgattggtccctgtgagccgcggctcctggtccggcccctgcgggcttctcaaggtggtcacactcccggtttcctaagctgctcttactcctgctgggtggaggggctccaggaacctgcgactgctgaactccatcttcctcccttctgttttgaagctcattcccatgtgctacctgcaggcttgctctaatgagatgtatgtatggaatgttatgtatggaatgttccagaatgccttcaatcatttcagccataaagccccacccaccacatgcacagcttcttgtctaatgcaggggtagcctggcaaggcctgactgttgtcactgtttttccagactccctgatgggggcggggggtccgggcatcagcgtctgccatggttctgcccctgtaccagcctcactgggacgtggcatgggggcagctcacgtggcaagagtggcctgggttagtctcactgcctcgggtgcagaaggccctgagaacatttctgcaggggaatgagtcgccaggtcagggggcacagaagattccagaaggacaccagggaggtgatgtcttatgagaggcacgcttccagcaaacagtgggagtgctgtcaccggcgctgcagagcccctgagctgcctcctccggggaactgggctcacatagaggctgagcccgaggtgggagatgcgcccccacctgtctcgtactccgcacctctgctccggtcacagtcctcagcacacttgctgggagcaggcagcacgctgtccctgcccctggaggtggcctaataagcacctgttgctgcctcaactcaaaggtctcgtggtggctggaaccagccaagggacacttgaggcctggagaggagcgccacgtgctgccccgacccggcccccacgctgccctgggtcagagccaagctgcccagctgccccagggccagggccctgacgaccatacagactcagattagaccgcgggagcttccaaggggagggagggcctgttctgagcccgggggctgctttatggagaacaccatgccagggtggggcagagccagggtgcgcctcctgccttatttccaggcacctggactgtccctgggcgcacagaggctctcaggcaagaagggctcagacgccaggcaaggatcctgtgccgtccagaggagcaggccctgcctgggttttggggtcacgggtgcagagcagcactaggtttggctctcggtggacccccagcccacatcacctgtccagcaggtgcaggtgacagacgcagtggccagcaatggagagccggggctcatgcggggggccttaccgggaaggactggaagagctggaaggagcccaggagtcggatgtagaggtgcgagtgcaccttggtggaggtgccgttgaaggtgttggccaccaccaggaacgagtagggccccacactgaagaactcccagtcgtaggcgccggaggtggcgatggtctggttggcctcgaagagccgggttgccgggttccacttgtagatgacactgtcgatgttgtggttgtcgcctggaaccaagggactgtgctgggggcagggaggcagattccacagccccatggcagccccgacggaggcagagcccagtccaagtccctccccgaggaccgaagacccacgaggacaaggccaaccgctggggacatcctttcttaccttgagcctcccgccctcagccccttgctgactgcacctctgggccatcacaggtgctattcccatatggaaatgcttggtggcccccaccgcccttgggacaggtgtacatctccatggcctccccgtgtcctggaggtggggcccaccgtgtcctggccccgctgcccacggctctccagcatccccacaggccaggccttcccacgcactgccacctctgcccggaggcccctccctctcaactgtggagctcccccattgggtgggtcgtgggctcaggggagtgcagagctgtggagcctgggcagggttgggtctgggaggtcctgcaggcggagagatgcccccagacccaggccggctcgtggagctacacaatggcaggtactcatggtggccgctcagggcagtgtcctggcctggaaagcaggtgtcccggtaccttccaggccagtgctcctcactgtctctgctggcacaaggcgggacagctgcctgtcctcaggaaacaaggccatggaggccatccagatcccatgtcctcggcagctgtcctccaccacacacctggccatgccaggcaccaggccagcatccctgccatgggcctgggcccaccacccaacatctgccctccctgtgctggtcagacctttcctgctgggaggctgcttagtctgtcagtcagtcattgaggtagtcagtcagtcagttgtcagtcagtcagatagtcagtcatcagttagtcactgaaacagttagtcaagtagtcagtcaggtagtttgtcagtcagccaggtagttagtcagttagtcagtcagtcagccagccagccagccaattagtcagtgaagtagtcagtcagccagtcagttaatttgtcagtcaggtagttggtcagtcagtcagccagccagccagccaattagtcagtgaagtagtcagtcagccagtcagttaatttgtcagtcaggtagttggtcagtcagtcagttagccagccagccaattagtcagtgaggtattcagtcagtcagtcagtttgtcagtcagtcaggtaggtagtcactcagtgaagtggtcggtcagttgtgtcagtcagtcagtaaggtagtcagttggtcagtcagttaggtagttaataagtcaggtagtcaggtagttagtcaggtagtcagttaggtagttaataaggtaatcagtcagtcaggcagttagtttggtagtcggtcaggtaggcagtcagtcgtcagtcagtctgaggtagttaagtcattgagatggtcagtcagtaagtcagtcagttaggtcgtcagtcagtcagttcagtagttaggtagtcagtcatcagtcaggtagttaatcagtcaggtagtcagtcatcagtgagtgaggtagtcagttgtcaggtagtcatcagccagtcagataggcaggtagttagtcatcagtcagtcagtcaggtagtcagccaggtagttaatcagtcagccagtcagtgaggtagttaatcagttagtcagtgaggtagtcagtcagtcagtcagtcagtcagttagtcaggtaattaggtagtcagccagtcagttcagtggctagtcaggtagttggtcagtcatgagtcaggttattaatcagtcaggtagtttgtcagtcagtcagtcaattagccagtgaggtagtcagtcagtcagttcagtagttagtcaggtagccagtcatcagtcaggtagtcagtcaggtagttagtcatcagtcaggtagttagtcagttgtcaggtagtcactcagtcatcagtcagtcaggtagttaggcaatcagtcaataagtgaggtagtcaggtagtcagtcagatagtcagtcagtcagtgaggtagtcagtcagctagtcaagtagttaggtaatcagtcagtcagacagtcaggtagttaggcaggtagtcactccatcagtcagtcagtcagtcagtgaggtagtccatcagtcagccagccagccagccagtcaggtagttagtcaactaatcattcagtcagtcagacagtcaggtagttagtcagtcagatagtaagtcagttaatgagttagccagtcaggtagctagtcaggtaatcagtcagttagtgggagagtcaggtaattaggtagtcagtcaggcagtcaatcaatgagtcagttagttagtcagccagtcaggtagttaggtagtcagtcagtcaggtagttagtcaggtagtcagtcaggcagtcagtcagtcagacaagtagtcagtaaggtaaccagtcagtgatgtagtcaggtagtcagtcaatcagttagtcaggtagttagccagttagtcatgtaatcagtcagtcaggtagtcagtcatcagtcagttaggtagttagtcatcagttagtcagttaggtaattagtcagtcagctagtcagttaatcaggtagttaggtaatcagtcagtgagacagtcagtcaatcagtcagtaaggtagtcagtcaggtaattagtagtcagtcagagagtcaggtagtcattcagatagacagtcaggtagttagtcaatcagtcagtgaggtagtcagtcagccaatagccagtcagccagtcaggtagttagtcaggtaatcagtcagtcagtcagatagtcaggtagttagtcattcaggtagtcagtcagtcagtcagtcactctttgaggcagtcagtcagtcagtcagtcagtgaggcagtcagccagccagccagtcagatagttagtcattcaggtggtcagtcagtcaggtagttagtcagatagtcagtcagttagccagtcagctagtcattcaggttgtcagtcagccaatcaggtatcagtcaggtagtcagtcagacagtcaggtagttagtcagtcagtcagtcagtgaagtagtcagtcagtctgtgatgtagttggtcattcaggtcgtcaatcagtcagtcaggtagttagtcatgtaattagtcaagtagttagtcaagaagtcaggtaatttagtcaatcagtcatcaggcagtcagtcatcaggtaattaggtagtcagtcgggtagtcagtgagttaggtagttaatcagctagtcagtcagtcagtttcagacaaggagggaggctggcaggtattctgtgctgggagtcagtctggcagtccatgtttctggggtggctgtgctgtgggcaggtgccccagggaccaccagtagatgtccctcccccagacagtgaggaacggtccagaacgcatgttcaccctgtgctgcatgtggcttattgttttctaataagatacacattcgccctgcctgcaagtctcgctctgcccctggaatggttgcctcccggtgtgaaggccactcctgccctaccttcccggtggttggccaccgccaggaagtgctccccatccacctcgaaggcctcccagtctcgggcgctgtgtgtggcaatgctctgatatggggtaaacttcagctttctgtggctccatttgtaaatgacagagaactcctgacccttctcatctggttcaaaattagccactgccaggaagatctgaaagagagtaaaccgggaccacgtggttctgcttgggtcggtgccagcggcctggtttctgaaggcttctgaacatcagcatctctctccagatccacggctgctacgtggtgcagggacagaggaccgaggcccccgcattacaggtcatcatggtggggtgggcgcagagccggtcattacattcatcaagacccttgaaaatgtccatattctttacccaatatttccacttctattgctatctgaaggcaaaaacacaaaagccaaaattcccaaattcaggaaaagctttatgcacaaaaatgttcttcataacccagatgaccagaaaaacgcatcacaacctgctctcctgtgttatgggtgtgatcaccacgcaaagctgtgtcagggcaatgtgtgtaaaacatgaacatggcgcaatgtgcccagggctcatagtgtagctgtgtgaacatacagaatgaggggcaaggtgcatggttcatggacgatgtgcttggaggcaaggacgccacatgaacctacgtacttgcttggatgatggaacaaaatattgtcccctttgcttttctgaattttccaattgttctttgatgcaaagttttttttataacaaaaaattaaaaccttatgatgtcatcaatcaaaaaaaaaaaaaccaactagttattcacccgccatgctggatgcaaatgcagcctgcatgagggtggctgtaagccacaggagagcagtttccatctgctgtgttcactgctttagccctgtgtccaggcagggcctggtgggcctccttggcacattgtaggccagtgagtgactatttgggggcagtcaggaggtgctgtctctaggacatggctgtgtagagtccagggagtggacggagctgggaagaggaaaccccatccttcccattgggatgtcaaccatctcccagacccaccacctcgaccctctgcccagagcagccctgacaggaaggtggctgtcagcctgcgaggtcccacccatggctcccctgagcctggcctcagccttgcatgtggacatcacgtgtcctcaacatttgaggaaaggaaggatcaggaatgtccattttctagtgtctttctgaaacgatttgtgggttcttgaccagctcatgtaaacactctcaacaggttttaaatgtagtgacgaggggtctatgtagaacgagatggcatgtgggaaatggtctggtcgtccgttttgcgggagccaagcagactgcctcaaagtcacatcctggatttagggtggtgggctcacgtgtgcgactctgtcagccttttaccgcctgaacgaggtgacaccgtgagaaactcctttacctgcagaatcagtgtagggggccccgcctgtggactcggggctttccaagagaaaggggatggagaaagtcaccgaacacagacttgcctttttcccgatggtgaaatgcctccaggcctgtgcttggtgcgtggggatgttctgatatgagacgaacttctcttcggtccacttgtagacggcggatgtggctttgcgattggctgtggccacaaagagccccacctgagggatgcggaacacctcaatgcccagggtctctgagttggtggacaagttctgatgctcctccacgtagtccagtctttctttggcttgtgatagaaacgttgtgactcggttaagatttccgagaacggaaatccagagcaatcctcgcgggagcgcgattcccaagccccaagtcacaagccacgactcctgcgcctcagcctcgggcatcagtttccacgtttcgctctcacaggaaaggcctgtcaaagggaggccactcactgctgccaggggctttgtgatctgtgcagcccccagtgaagtttacatgttgtgggttgtggccttgttaaaaggctcactgcttctacggcaagttgtgctctcgataatgtgaaagagagcagctcacacacgtgctgggcggaacccatgcccatttcccacgggtaacctgtctggagcatctatcgccacctccactcacctccccagcagcgggaacggactgctgagaaggctctctgtaaaaataacctttcaggctcgtcatctccttggatctcatctctgatctagcagacagggagggtgtgggcagaggcggcagccgggccaccctaccaaggaggctgcagggaggcaggcattgtcttcccatggtttgggaaggggtaccacgcgatgcccagccctgtcagcccgtgtgtcatgccctggaggttcacatttccaattgagatgcacaggctcgaggctcctggtggggcagtttcctgtcctaagtggtgcctgccctgaggagggcctgtggctgagtcctgtggctctagggagggcagtgtcctgcccgctgcttgctttgggggtcaggactgatgctgcctctcactcttagaagtgccccagcctgacggccaagcctgaggtcattcagaggtggctgaggtgccccctctcctagcctccactcccagtcacactgtgccagagtggccctgcatgccaacgccccgggtgcagggctgcctcacctgctaacacggagacccactcgttgccaacacacagatacaggcccttccggctggcatcaaaccagaactgggcgtcttccacctcggtacacggtggctggggtcccagcgtcactcgaatgttggtttctgaggggaagaccaggaagatgagtttccagcaagccagtgcccccaaaggaagacgacacaggaagaggcccccaaaccaggctgccctgcctcagcctctgcatgcgggcctggaagggcccctgcaggcaccttggcacaagcctgccacatcacagacggggaattgagaacctggcctaccggtgacgaaggacatcatgatgccccctatatggtcagcccaccctctgtccactctgaaaggcgtggctttccatcccattgaggcagaaaaggcctgctcctctgagagtcctcagcgattgcacagggcatggtcccccctcaggagggagtccctgttgacagtggtgtatcttaacgacggcttggcttgaacctgtggcggtttgatctcatcacttccagtaatcacaccccaccatgggtcctaattctgccacctcttgactctatgtgggacatctgtgcacctgccagccggtgctggccagcggtgtgacacagtataccatgcggcccggatgtgttggaggtgggggctcccctacttggtaaccgctaaccctgaggctcgggggctcggctgttctccacctcactgcccctcgggttggctgagagcagtggggatgcggcggggaggggcatttcagattctccatggcaggagtgtggtttaaataaatacagtcacccttgtaacttcacacaagagaaaatcaagcggggaggccctctgggccgggggatcgtggaagacgtgagtgtagggccagagtgggcccgactggggcgggctggtctggatgatggtgggacagaggcggggtggggagaaatggcccaaacgctgtccttggggggcaaaaggggatgagggatgtcagatagctctggacagactttctaaagtaagttaggcctgttttctgcctggggtccccaggaaggggctggatggctgtcgtgggagtgcttggagggaagggcaggatgacactggcctgtctgatggtgccgcctgccttcctaggggtgggccccgagtatccccctggccaatatgaccgctgccccccgtagcagtgatgaggggggcaggcacacgagaggggctgagagctgagccctgagttcccgcctggtgtgaggccagggctctcgcatctgcctttggtgtgggggcgggtggcccccctactaaccatagggatattttagcacctcgttatcttctggcttccccgtgagagcctgcaggacccgtgggatggacagcaccgccagcggggcgttcctgctgggacacagccttggggtggcgtctgagcccggcagcaggaccagttgcctcaccagtccctgcagagagagggacagctccttcaggcccgcgctgctggggaaggacccgctgaggaggcgaccactgagcttggcccatccagagcccggaggaggctcgggtggatggaatctaagcttttgcagagctaactgggaagagtttacatgatggttactgaggaggccatgggagcaatggtgaagaattgccccccttccgagggaactgaaccacagaaggggttttttatgtgaacttagagtgactggctactctgctcatccaacagcccatccacccatcctgttcatccatgcattcatccatccatctgtccatccatcagtccaatccattcatccatcactaatccatccatccctccacctacccatccattcatccatgcattcatccatccatccacccattcatccatcactcatccatccatccctccatccacccatccattcatccatccattcatctttctctccatctgttcatctctccacgcatccatccctccatccatccattcatctttctctccatctgttcatctctccacgcatccatccatccatccatccatttgtccatccctccatctgcccatccatctgtcaaaccatgcatcaataaatattcagagcatctgctatgtgccaggcatggctctagacactggactcagcagggaacaaaggcctctagcctcatggagtgaggtccccactcacacgtgagtggagacacaggcaccgagcagacacccagctggcctgagagcagcaggccctactgaggaaagacagctccggggaaggggctgcagggcagagtgtgggcatcagctcagcatggtgggggcagcctgaagaggaccgttgggcagggacccaagaccatcagggaggagggtgccaggaggaaacagcaagcgtgaaggccctgtggtagagactccacgcacgctgtaccttcttttcccagttagcacgtccaaggatctgtcaactagagcagtaggacaactggcctggggcagtcccatcccgcagcacgggtgttgggaaggcagcccctccatactcgccatgaacaggcctttggctctcctccggctgccgacgaagaatcgagctcctttcactgacagggtggctgggaagggcacatcggccattctgaaaatatcaaaggactgtgttagggccataggagagtggtcaccccagtttactcacagaaggaacaggaacaagcccctcactaagcagcgtgcatctgtgctgtggctgccacacaaaggatggcacacagggctgatcgcctgcacagctctggagcccagtagcctggatcaggctggggcagggtttctccgaaggctccagaggaggacgcttcctcgactcatcagcttctggtggctgcacgtgctccccgtgacctgtggccatgtcgctccagtgtccgactctcccagtatctgtctcctggtaaggatcctagtcacactggagcagggcccgcctcactccaggatgatctcagcttgacttgatgactgcaaagactctgtttccaggtaaggtcacattcacgggtgctgggtggacatgaattcggggggggcacttcaccccagggccagggcctcctgcagaagtgcgtggtgacatgcttagtggttcttccctatctcatggtgaacgtgcagtggcttcgacctgcacagggtcctccagcccactcaccctccctccactgagctcctgcaccatcacccggcctggggtgctgggacagatggcttcaggacaggaaggaggctggtgacccatgagggtgtcaggagcaggcggtcttgacgagtgcgtggaggctgaactccggagatggagcaaggtgggtgcccgctgagggacagcgtggctagagctcctgggcggaagagcaggggtgccttcgggctcgcctcccgcccacgctgccactgtctcttgtaaaacacctgctccttccagtctttgccatctggctgcagctggccgtggtgagctcagctcctgccctgctgtcccagaaagccccgtcctctgcacacagctcggcctctgctagggtccaggctgctggcccccaagccctggcctgtaccctccgtagcagcctgccaaggggttaagttcttccgtggccacaattggttccaggcctgtgactccccatgtcccaccatcttccccaggaagtccacttttaaaacattcggggaacattcctaatcattatgctttcgaccctgatttcttcctttctcctgatgaggcaggtgaacgtttgtccaggcctcaggcgctgccgccacgtcattcctagctgctgtggcaaagccagaagtcaggcagcattcacgtccagccaggactttctttacggggtgggaagctgctgctaggtcaggttgtcttcagcctgcacagcacgtccctgggaggcttccagctctcaggacctgagaactcatcaccgtcctgagggccctaaagagtttggggtatggtgggagagaggctctgataaaagtgtgtttaagctaagtgcataataaaaatatttatgcgataagtttcataacaaaacagaagatcctacctttgaaagtaatattcgaaataatttaatatttaatagatttaatataaactggatcatttgcaattaaaaagacagaagcgcagccctgctccacagtggtagatcctgacatgggtaaccaactggccgagctaggggactgaggactcctgtccaggggacctaccgtcaggccacaaaccaggcgacggcaaaaacgagaaacgaactcggcttccaaaagcccccattgtgtccaaggctacaaaggataatcttgtactcatttggagtttctgtcaacatctgctccctcgtccacgaggaacctgccatgtggagtcacggagccaggcctcggcctccagcctggaggttggggaaggagttactctgacttcccgctgctgcctgttgtgatgttagcgccctccccacagtgccggtcccctgccaagtcccctgagctacttctggaaaaggagtgcgcttggtgtgatcgcccttaccttgttctaagccactgactctgatgtgcagcgggttttgtgtttaaggcgtggagaaacattaaaatcggggttttgacaggagtgtgcttcataaacgctccgcgggagaggcccattccccttccagcccgaatccagggcatcactcaccacctgttctcgccaatgtccactctgcccacagatggtgagcctgcctcaccccatgcagccctgcagaggctggcgcggacgctgacctgacctcccatggtcagcccctgcctcatgaatggctcttgccccctggtcggctcctgccccgtggatggctcctgcccctccaccccatggctcctggcccctggtcggctcctgcctctccaccccatggctcctgtccctccaccccatggctcctggcccctggtcggctcctgccccgtggatggctcctgcccctccaccccatggctcctgaccctggtcagctcctgccccaggacagctcctgcaggtgttgctcggcgagcacggctgaaggatgcctggcctggcaggactctgaggactgcaggtgcaccctccccgggtgggtacctacatgtccaccgggaggccgcagtccgtggtgagggagaagacgcctgcggacacagccaggaccagtgtgtgccagcggccatccaccagggccgggctgcggaaggacactcgggtctgccaggcgccggccgtgtcctcgcgaaggaacaggaagtgcagctgggcaggtgacaaccgcaggccgagcagcagcaggtcgctctcctctgccaccaccgtcagcaggtactcgttcctctgtggagagcgggccaggctcaggacggggctgggggtaggggtcgggtgcgggggcagggcagatgggaatggcagaggtgatgagcacaggtggtgagaggagcaggggctgactggaggggcgaggtgagggggcgcggtggatgggaagggcagggtggataggggccttctaattagccctctaatggggagggatggggttgatggagcgctagggctggtgccaggggtggagctggtgtgagggggcggggctggtgtgtgaggggtggggcttgtgtgagggggcggggctggtgtgtgagggggcggggctggtgtggggcggggctggtgtgtgaggggtggggcttgtgtgagggggcagggctggtgtgtgtggggcagggctggtgtgtgaggggtggggctggtgtggggcggggctggtgtgtgtggggcagggctggtgtgtgaggggtggggctggtgtgtgaggggcggggctggtgtgtgagggggcagggttggtgtgagggggcggggctggtgtgtgaggggtggggctggtatgtgacagggctgatgtgtgagagggagggctgctgggccaggggcaaggctggcgccaggccgtagggaccggcttagtcaggagcacgggtccatggtaaaacccaaaggcacccccacacactaggatggctaatgcccaaagaacagaatgtgttatgctggcgacactgtggagaaactggaactcttgcgcactgttggtgggaatgtaaaatggtgcagccactgtggaaaacaggatggcagttcctcaaaaagttataaacagaacgaccaaatgattcagcaattccacttctgggtccattctcaaaagaatcgaaagagatacttgtacacacatgttcatagtggcttactcacaattgccaaaaggtagaagcaacacaagtgtccacgaacggatggatgggtaaacgcagtgtggtccaaccacacagtggaatattagtcagccataaagagggaaggaaatgctgacacatgctgcaacatggatgaaccttggggatgttccacttatatgaggtcactagactggtcacattcacagagacaaaaggtagaatggtaggtgccggggctggggggtgatggggagtaagtgtttaatgggtgtggagtttcagtgttgggagacgaagaagttctggagatggacggtggtgatggctgcacaacaacatggatgtcctgaatgccactgactgtacccttaaaaatagtttcgatggtaaattttacattacgtgtattttaccacaattaaaaaacaagaacgtatacaaatgcggtgtccaccaagacctcagagctttttggcttcctttccaatttgggttatgtgaaacaaagcacttgattatacttatttccaacttagattccattcattcctagcccaacacaattaaagaattgaaagtgattaagcctgaaaggtaaagcaggtatgaaaacagttagacagcatacagtcacgtacggccagagcctgtttcagttgacagtggacagcacaggggatggtggtcctgtaagattgtaacactgacgttttactgtatcgtgtctgtgtttagaaacacgaatacactgtttgtacactgcgactgcctgcagtattcccacagtagcgtgctggaagtagctgctcactgcaacctctgcctcccaggttcaagcaattttcctgactcagcctccaaagtagctgggactacaggtgcacaccaccacacccagctaattttgtatttttagtagagatggggtttcaccatgttagccaggctggtctcaaactcctgacctcaggtgatccgcccgcttcggcctcccaaagtgctgggattacagataaagcaaagttttgagctttaagaccagaaggatcaatttctatgtttatcaaaaaaaaaaaaaggaaaaaagaaaaaaaaaaactatctatggggctattaggtctttttccattggaagtggactttctgttctgcccaactttgcttccactccaagctccttaccctcaggttgggagacagagggactcttctgtggaaggaagccctggtagctcagactcaagagttcacagtggcagagtccagccctgtcaggcttcttcctgcagccgcttgtgttccatggctgatggagaggaggggcctgcccagctgcagtggctgttcacactctggccccctttccgggcggtgctgggcttctcccatcctcaggctgctgctcctgccagtgctccctcggcgtcctccggcacagacctcagcaacactgacttctgggcctggttcctacccactcgcattttgggcccttgggtgatatcttgccattaagttctgtcctaaatggaacccatgggtttttctttttctatctggtaattctctctgtttctatttgggatttagggagatttagaaactatgcctcaggtagcaccatgtctctaggatccactcctccctctcaaaacaatccttgattctagtaaatgaaaattcatagcaaaaaggaaatagaaagacttggtttaaaaataaaaggtttctacttaaaccccacagcaaacactgcgtgtagtggtgaacctttgacgctttctcatgaaagtcaggaacaatcaaggattcttttaattttattcagcatcatcctgggtgttcaaagtaatgttgccacaggaaaaacaatagaaatgggagttttaaagattggaaatgagaagttaaattctccttattttcaaatgatgagctcatctacatagaaaaatccaagaaaatcaatgacaaactgtaagaactaataagagaacttgcaaaggaaaggagctaaacatatggtttgatatgaagacaatatatatgtaaaaaatttatatagacatatatacaggatttatatactaagacaacataatagaaaactgttccccattcacactagtaaaacatccctatgaaatacctcgaatttaatccaaagaggaatattttagacctatagaagaaaatgatggaattctaaatggaactattgtactgtgtaactgcaaggcaagacaagatgaacaattatagtttcctcctacatatttaaaagctcaatgcaatcccaatcaaaattatagtagtttaaaaaatactggaaaagctttctaaaattaatcgagaacaagctagaaccaacgtttttagaaaataagatagtggcaccttccttaggagctgttagtttcctcctacatatttaaaagctcaatgcaatcccaatcaaaattatagcagtttaaaaaatactggaaaagctttctaaaattaattgagaacaagctagaaccaacgtttttagaaaataagatagtggcaccttctttatgagctgttaggatatattatgaagctgaataacatggataaaacagctggaatggatgcaaggatagatcaagagatgaatagaacaaaatacaaaatagggatttcagaagcaggctatacaaacatttctcagacaaaagagatgtttcaaatgggagatggagagaataaactaactttaaaaaaggacagttggctattggtggaagagaaagattaatacgtcatacctcacacaagtcatatcagcaaatggggcaaaaagttaaatctaagcaataacaatgaaaccaatatcagcaaaattaggcctgtttccaatctcggggagtgtgctgtatagaagcaatgatgggttggaaatatttggagggcatatgatggacagaggatccccagccctaaatccacaagaaaaacacacatagcctgataagaaatgggctaggaatgtgaacaggaaactttcagtgtggacggccatgcatttaggccatagtgggttcccagcagccgtcagtgcggagggcagggagctgagagcagatcaggctgagccggggtcacgcggggtcccccagccactgagggccctgggcagcaaccacgcagaccccgccccccaggctccacctcactttctgtggcatttctgtgcctgttctgaccacagccgtggcagcaccatgtccatcaggctgcggccggcctggctgtggggtgactgcagcatcccaggggcgggcattctcatcagcgttttggtctctgcagctggcctggaggagtttgtctcacagtctgaggactgactgctctgcacccacccagggtggcggagccccatgcgctgcctgatcttaccattgtccccgctgacggcctttcccacaggacatcacaggcagctcatgctccccgcgtggaccaagccttagagagatgagagtgtcgctgactgtgtgcccgcaccggcatcatctgtgggaacccaggctccttgtccctacacctgtgtggaaactgctgccccccccccccccaagaggagaacctgggcagcgccagggttttggggaatcctgtgcctccatccgcccaccccatgatgcttttgttcccatcgagtcccttgtctcctgcgcaggtgcagcagcccctccctctcccctcgcattgctgctaaaacgggcagaaccctcgggcgggcggcacacagggagggtgaccaggcctggaggctgcagtgcccggaccccagggcagcttcccggaaggtgaccctgcagtgtgggctctcccaggtgagagagtgggtgggacagtcctggggcctggagagccccacagcccagggcatgacagcgaatgaccaggctcaggaagacccgggcacaggggctgagctgggactgagccttcctgggagtgaccgtgagtcccacctggtgaccccctggaggagttaggccactgtcccctgtgacttctaggttaagtcactcattcctaaaaataatcatggctggaggagaccaatgtcagctcaaaaccatgtgtcccccaggaacacaacagaaaagagaatcaggtgaccaaggagagtttattggggagcaggaggaggtgctgagaggttcaagtcgaggccaagtgacccagagcagagaagctgggagggaggacaggggacctagcaggcaggtgggcacctgctggaaggcaagagctggggagctgcaaggatggaggctcctgggagcaaggagggggggtcacctcagcacaggggagacacggggacccgtcctaggtgggggaagccacctaacccaggtcaggaactgagcccagctggcccagggcgggtgcccatcagcagctggactcctggcctgagcagaggcctcagcaggccgggcgggagcacgcggggcggcagaggagggacacgcaggaggccgggcggcagcagctggcctggcaggaggaggcaggggcacagcaggaggagacaggcatacagcaggcgggccggcatacagggcggcagaggagggacacggaggaggagggtctgcagcaggaggtggtgcagcaagccggctggcagctagactgctggcagcatgaagtggaagccccagagcagacgggcacacagcagatgggcttgcagcagacaggcttgcaacggacgggcacgcagcaggcctgctggcagggggaggaggtgcagcaagctggatggcagctagactgctggcagcatgaagaggaatcctcagagcaggtgggcacatagcacacaggcttgcagcaaacaggcacacagcaggactgctggctggaggaagaggcacagcaagttggctggcagctagactgctggcagcatgaagaggaatccttagagcaggtgggcaggcagcacacaggcttgcagcagacgggcacgcagcaggcctgctggcagggggaggaggtgcagcaagccggctggcagctagactgctggcagcacgagggcgtgcaggagctggtgcagcctgattggcaggggctgggctcacaggctgcctggcagcaggggctggacacacggctcactggggtgcagaccagggtcaggcagggggccggggcgcagcagctgagggcgcagcagtggggctcacagcagctctctgggcaggcatccacctgccaggagtcggagcaagcgctggagcagacggacatggtggacgcggccatgctggggtggggaggaggtgagctgcgggaggtgtgagtgagtgagtgtgggagtcagtgtgtgtgtgagtgactgagtgtgtgagtgagtgtgtgagcttcgtggggctctgcttttataccccttctggccttgttgttccagggcccacagcgtccccttcctggttgctgagaggtggcgtgtgtcatgactagggatgtttgtttgcctgtgatgtggcccaggtcataaatctcctgtcctgtctgggctgtagcctgtcccatgtggatccctgggggcaagagtggaggtggacctggtcccagcacgccaccagtgcagtccgggttgtaagaagggggctgcggaggcaggggtggcccttcagccttatgcaaagtgtggcatgccagggtgagagctgtcccactcacgatcgtgggggcgtctcctccctaaagcgggtcctcactgaagaggcagaagcagctggtagaagcacaggatcactggagcagccggagagaaggtgcagcagtggccagcgaaccccacagtggtggccctgcacattccttcccccatccccatcactgaagaaattagagccccaaacagggagaaggggagcaaggaaggagaggccatgcccctccccacggccttccccgaggtccactcagacgttggtgtgggaacgctggggataggactgggtttcggacaggaaagaaaagttttgaactggcccatggatttggttctgctcttaaaggccatagctttatgatgtgcttcaaccatagataactcaagtcccgttatcaatattcttaaatttatttttttttttttttgtacagatggcgtctcaagtgatccctcctgccttggccaaagtactgggattgcaggcgtgagcccggtgcctggccatcatcagtatttctgcaccacgtgtcttccctgttcctgttcattgtccttgctgtcctcagcttcctttcttcaaacgtaagctgcatgtgagcagggagtgtgtttgtcttgttcaccactcagtcttcaaaggcctaaaatcatgcctggcccaaggaaaagcctttataaaaatgggctgaaataataaacttttttggagaaattattgaagagtaattttgagctctgaacgcgattccattgtgccacctttttcttatgctgtataaaatgctctgtcaagttctcctttcgtgtgtggggaactggcttacatcagactggccatctagctgagaaatattaggaaatctggtttacaaacaaaatctctgttcgaaggggccgggaggtatcaagacagctgagacttgagtgagtgaatccgcattagagagaaactgcacagaagtgagtccaatattccttgtggattttcttactgaggcatttaccaatttacagaccacagccaagaggccgagagcctgatcagctgagcagagcttttagtagtctcatggaattagaagaaaaaaaccacagagttcaggacctgacaaggtggagggattctagcaaaaacaccctaggctttcagttggaaatgctgaatgtaagtgaagggctactccctaggaggaaggaaaaaccagaaagaatgaaacctatctttaaataaactcgcactgaactcatatgatctgcctgtagcctaactgcctcccagaaacaaaagtgatctcttctggagacagcagcatcaacagaggctcaaatcatcttataaattttcataaagtccttcatgcagtcaaaaaattactagggatattagaagacaagaccaactgaccaaaagaccaagaggaaaaaaacaaacaagagaaacagacgtgcaggagatctagatattagaattgtgaaactggaatttaatgctgattaacttgctcaagaaaatagagaacaaatggagaatttcagtgtcaaactggatttattaaatggaatcaaacaaaaattctggaaacgaagaacacaatagctgaaattaagaactaggtagcttagctttacaacatatagacaaaaccaaagagaagattagtaaaggaagggagatgaggaaatttcaagcctgaatacagagatgggaaagaaaagagggaaataaagaaagtggagcaataaacatgcctatattttgtgaaaatttatgggaaaaatgattgaaatcctacaaggagaggagtgaaataggggtagtaaaatatttgaagatgtaatggacaagaactttaacctgatgaaatgcatagatgcaaagagcatttaagaatctttaggccaggcatgatggctcacacctgtaataccagcactctgggaggccaaggtggtcaaactgcttgagcttaggagttgaagaccagccaggacaatatagcaaaacccaatctctacaaaaaatatgaaaagttggcccactttggtggtacatttgtagtcccagctactcaagaggctaaggaggagaatcacttgagcctgggaggtagaggctgcagtgagccaagattgcaccactgcactctaacctgggcaacagaaagagacctgttaaaaaaaaaaaaaaaagaaaaagaaaagaaaaaagaaaaagaaaaaaaggaaccctccaaaccaagaatctttagcaagtgaacacaaagaaaactacacctgggcacattggggttgaaatccaaagacagaaaaatttaaaaacagccagaggaaaacaagacatattaccttcaaagaagcaacaataacacttacagatgacttctcagtagaaatgatgaaaggcagaggacaatggaatgatatatttactgtctgaaagaaaagaagcacaaagctagaattctatacctgggaagaagattcccccaaatgagaacagaataatgacatcctctggacaccgagaggatatgtcaccagcaggatctgcactacagaaaatactaaagggagcattaggtagaatgaaaacaagcacagatgaaagcaagaagttgataaggaaatgaagtgtaacaaaagaagaacacatggggaaaatctaaatgaatgttgactgtataaaatgtaagttgtaaaatatttatggaaataaaatacatggcaagaacacaaaattcaggaggggctacatagagttaaagtggcttaagcacactgcaccatctgaaaaataatataaggtctaatttacatgagactttaaaaagtcatggattcatgttataatctccactataataacaaaggaatatacgactcactaggaagtagatgctagtacttggccgaatcattcctccccaaaggttgtctccacccagaacctcccaatatgaccttatatggaaataaggtatttgcagatataattagttaagtcatacgggatcatagtgaaccttaaatccaatgtctagtgtctttaccagagaaaggagaaggaagttcagacatacacacaaagggaagaagatgatatgacaacagaggcaaagattggagtgaagatagaagccaagggaacccaaggtttgctgggtgccaccagaagctagaaggagcaagggcatattctcccttggagctcggagaaagcattgccctgtggaaaccttcatttcaggtgcctggccctaagaactatgacagaataattttccattgtttccagtcacacttttggtgtaattagctatggtagcactaggaaccaatacaatgaaggaataaaaaaacttaaaacagtcaatccaaaagcagtaaagcaaggagataaaagggagtagattccttgcataagcaaaaaccactgtgagatgggaggtttaaactcaaacgtatcagcaaagccccacattctttccagtcctgcccatcagatgtatcattactttagtcaacacagctgtatagggagagttcactggggtttaagtttgcgctgtcctggtgatccatgatgtgaaacatgtttccatgtgtttatttgccatccatatttgttctttagtgaagggtctatttaagtcatatattatatggcaaaatactaaacactgtgggattctgtagatgtgatattatggcaatagtaatcataataagacaaaaaaaaaatcagtgccttttaggggctagggtggggatgtggaatgactacaaaggggcatgagggaaatttgtgggatgatgagaggagtctatgtattgatggtgttggtggagacacaactatctatatttgtcaagacacagaatccaagaaaaggaaaagtcccaaatatatcatactgattaaatgaatctaggattaaaagccattctacaaagcaagctatggacccaaagactttcaccactgaatgctgtaaataattgggagagaaataatgctaggcttaaatttctcagcttgttttattaggccatcataattttccagaccttaggaagtgggacctgtctagtgagagcaactgaggaatgctatgtgctgcccggggggagccacatggatgttacctggggacatgatggcctggtgggggaggagccagccacagaccaggagaatggccaggaacggaggctaatgaggaagccactgtcatgcagaagctggagcagactgatcagcaggggctgggcccacaggacgttatgcactgatgaaagtgaatccatcaagaagatataccaattgtaaatatatacatatctaatatcagatcaccaaagtatgtgaaacaaaaatggacagacatgaagaaagaaatagacagttctggttctacaataagagagacatcaatgagccattctctgtaattaaaaaaaaaaaaagaggccaggcgcggtggctcacgcctgtaatcccagcattttgggaggctgaggtgggaggatcacaaggtcaggagatcgagaccatcctggctaacatggtgaaaccccgtctctactaaaaatacaaaaattagccgggcatggtggcagccgcctgtagtcccagctacttgggaggctgaggcaggagaatggcgtgaacccaggaggtggagcttgcagtgagccgatatcgtgccactgcactccagcctgggtgacagagcaagactctgtctcaaaaaaaaaattgattaattaattaattaaaaaaaaaagaattaaattgacattcagtaaagaaatagaggacttgaagaaccccctaaacaggtctaacgtagatgcagaaacatccaacccaacaagagtagacaacaacacactcttctcaagttcacatggaacagttgccatattagactataccttaggccacaaaactagtcttaataatttaaaatgatcaaactcatagaaactatcttctctgattataatggaaagaaactagaaaataacagaagaaaaactggaattcacaaatatgtgtatattaaattacacactctcaaacaaccaaggagtcaaaggagaaactcaaagagaagacagaaaatactttgagatgaataaaaaagaaaacacagcaaaccaaaacttatgagatgcagtgaaagcagtatgtagagggaaattgataactgaatgcttacattttaaaaaaaaataaagatctcaaatcattaatctaactttatatcttaaggaactagaaaaagaggagcaaactgaatccaaatttagcagaaggtagaaaataaagactagagcacagaaaaatggaatagaaagtagaaaaccagtagaatcaatgaaccccaaagttggttctttaagaagagcaacagatttgacaaatctttatctgtctagatctttatctagacaaatatttatctagattaaaagatgacagattcaaataattaaaatcgtaaatgaaaatgggaatatcactactgaccttacattaataaaaaggattataaggaatactatgaaaatttgtacaccaacaaattagataactaatatgtaatggaagaattcttataaacacacaaactaccgacatggctacctttccttcatatggctccaggttactgtctagtgcccttttatttcagcctgaattagcatttcttgtaaggcaagtctattggcaatgagctttttcaggttttatttaccttgaaatgaatcactttctcttcagagtctcgctctgttgcccaggctggagtgcagtggtgcgatctctgctcactgcaagctccgcctcccaggttcccaccattctcctgcctcagcctcctgagtagctgggactacaggctcccgccaccaggcccggctaattttttgtattttgattggagtttcaccatgttagccaggatggtctcaatctcctgacctcgtgatccacctgccttggcctcccaaagtgctgggattacaggcatgagccactgcgcccggcccctctttcatttttgaaggataattttgtcagatgctgatgcctttttggttgttggtttcccctgccgctgtaccccaagccagcatgtgaaatatgtcatcccaatgcctctggcctccatggtttctgatgagaaattcgctgttagtcttctgtccagcagctttctagattctgttttgacttttgagaatttgattacactgtgtttttgtgtgattctctttgagtttattctacttggggttcactgagtggcttgaatgtgtagattggtatgtcttctcaatttgggaagttttggccattatttcttcaattattttttctgctccccctgtctcccctccatctggaaatccagttaagtgtgttggtatgcttgatggtgtcccacaggtcttctaagatttgtgcatttttctccattctcacatctactcccctttgtctcagctactcctcagactagagtatattaattcgtctgtctttatgttcactaattcttccacctgataaaatctgctgttgaaaccctatcatgaattatttatttcagttgttgtaattttcaattccagattttctgtttggtttctttttaaagttcctatctctttattgatattctctatttggtgaggcatcattctcctggtttatcttaattctttgtctgtgattttatttagttttttgaacatgtttaagagagctgatcgaaaggctttatctagtaagtccaattctgggcttcctcaggaagattttccattaattgctttccccccatgagtagctcatatttcttcccactttgtctggtgaaaaccagacagtgactattacaatgggatatttctgggtatcaggttctcctccctctgtgcagtttgctgttgctgattgttgtggattgtggttgtttttgcttgtttatgtcaagttaaaaaatagtttcttcatcatgtgtgctcactttctattagcttggtgctaagacagtaatttgacagagagttccttaaacgcctggaatcaaaaaattgtttttcttcagggtttgtagctgggctctgtgtattggtccacaccccccagcactcggctggggagtttgcgactctgccttccccttcacttcctgcttgcatcttcacttcctgcttgcacctttacttcctgcttgcaccttcccttcctgcttgctcagagcctgaagttcagccagaggtgagcactgagagcttctcaggtcttttctgagctggtgccccatcatgggcatgcgtgggggccttctggactcccaagagtaagtgggatctcccacctcccttattcctcaaagcatgtcatcttccagcttttcctcccaggctttttgggcatgcccaatgttttctggctgatacctttggccccaggtggcattgactgtttaatgttctgacaaagcctcagtgtagctgctctctgccttgagtctgatttggtgaaataaggcaagccctgtgtgttagtccttcagggagccaccagatgggtagaaacagacaactgcactgccttgcaaacaaggtcccctctgcttccctggcaacagcatcccacatcagaaactcgggctgctgccttcctgactgtcacccagctggggagtgggggatggggcaagggggagttaaaatccacaaggttgtcctattgggttgtgctgctttttcttgattatgtgttcccttgactgctgcaaaccttcaagtattttccagagttcagataaaattgaactccaccccctttgttggggtgggtgggtggacggcaggtggggatgggaaggtcttggggaagtgatggcggaggaagcccaggacagtgtgggaccacgtccaaaccagagggtgggagaacacgtgaacacgtgaacatgagtgcagatggagccagtttcaaacaggattgaacaaatccgagagtagactcctagaaatacaactgcagagccaggggacgctggccggggacggtgggtttgtttatttgggttttgccagtttctgatgttccgtggagggacaggccctcacagttccccgctgcaccatttcctctgacgtcggtattcacaggcacaattagggaccatctttggagggcatttctcagtatctctaagaattttaaatccatgaacactctgcaccagcaatgccacttttaggaatttaggcaaaaatgtacctgagtgtggaaaggtatatggtagaaacacccacagaggtgttagagatagaactcagagtcgtaaggaaaacgagcgcttagacaaaggactttttagcaaagcaaatttatctttgcgcagagaagtgcctctcacgtggccggttgccacgagagcacacagaacaaaggagagtgaaagtttttatttttgacgcaaatcctgcccctgtgcccttttttaactggctggggtcggaccacacaatctaagctagacccgattggctaaacatttaggggaaggggtcgtctgcggcgagctagagagtcagtcttttctcaaataaggaaaggaatgtgagctggtgctgtggcatgcctgggcgtgtaggaaaagcagaaggaaagaagaagaaagacatggggaggggtactgggaatgaaacactaaaggactgatcaggctgtttgaagagaaaccttgccatatctcacaagaggtatcgtttgtaataatgaacaactggagagacagtcagggccatccacctggcgttgcagacaccaagtgcggcgtgtccacactttggaacgctgtacaccttgctgaagaaaaccatgagaaaatagtttttaaaatcaacccggacaaaaaaaagaataatgtgtgccccccgcattgtgattgtatagctgtggagaagtaaagactcagggcctcttgcgggcaacgtggtgacggtcatacctcgccagcatcccttgcctgcatttgcatttctaggagtctattctcagatttgctcaatcctgtttgaaaccacatctggctacatctggacctgtgcgtccacgtgtttctctcgccctctggtctgcatgtgtccccatgctgtcctgcacttcctctgccattggggccttgctgttcccaccggccctccgcccacccagcccagcacacggagctctggaggccgcgtctctgttctctgctctgcatcccagctgtaagcctggtgcaggaacagagggcgcccctgagcgtatgtgagtgtgcgcaggaggccaggatgcccaagctgtccctgagtggaactccctgagcgcagggacagctggagcccaagtctcccgccgtgtcccacctcccagcacagctggggcctgccaccccccgggacagccccaacccttgccatgggaaggagctgcttctacccacagtgcgtggggcgttggcctgagtcatgtggtgtctgtgggactcagccaatgaacaaggcttttgggccccacaggacctgggaggggagccggacagcagaacgtgccacgaggtggacaggagcttccaggtgtcacacaagagccccccggggcccccagctggggaagtaaagagatccacggggcccagccccccagagccaggccaggccccactctgccccctcccgccctgggtgcggagagtcagcacggagtcagctggggccgcagacgctttattggtgctcagaggcagagggtgacgctcctgggggtgagacccaggtcaggagggcccatccccaaccagcgaccagcgaccagcggagggttgtggtctgcagccaggaagcaccgtgaggagaagccagggctcgcccgcccggcgggaggtcagagaggagccagtgagcatctgagaccccggggctgggcggctgtggctggggctgctccttctgtgctgagctgtgctgaggctgggtgggctgggaggtccaaggactggcagggaggtggggcctgagcccggctggccctgggggacatggccatcagcagctagacttttggcctgaggaaaagctgcaggaggctgggcgggagcacacggggcggcagaggagggacacagaggaggagggtctgcagcaggaggaggtgcagcaagctggctggcagctagactgctggcagcacggagaggaagccccagagcaaacaggtacacagcagatggacttgcagcagacaggcttgcagcagacggacacacagcaggactgctgacacggggaggaggtgcagcaagccggctggcagctagactgctggcagcatgaagaggatgactcagagcaggtgggcacgcagcacacagctttgcagcagacaggcacacggcaggactgctggcaggaggaagaggcacagcaagctggctggcagctagactgctggcagcatgaagaagccccacagcagacgggcacacagcacacaggcttgcagcagacgggcacgcagcaggcctgctggcagggggaggaggtgcagcaagccggctggcagctagactgctggcagcacgagggcgtgcaggagctggtgcagcctgattggcaggcgctgggctcacaggccgcctggcagcaggggctggacacacagctcactggggtgcagaccagggtcaggcagggggctggggcacagcagctgggggtgccgcaggggagctcacagcagctctctgggcagtcgtccacctgccaggagttggtgcaggcgctggagcagatggacatggtggaggcggccatgctggagtggggaggaggtgagctgggggaggtgtgtgagtgagtgagtgtgtgtgtgagtgtgtgagtgagtgtgtgtgtgagcctgttggctgctggggcttttatatgcccagggcctgtgttttcccagcaggagactcagcaacgccctccacttccgtgttggtgtttggagccgggaggaccctcattatttctgcttcctttgccatgacttgtcctcactctgctcctaacactcggctggtcctgggcaggaccggcgcccctggctgagcctgtcccccgggaacaccaggagggaaggtgtggcctctctggggctgacctggtgacttccacctggcaggtcccgtgactgtgcccagcgtgagctctgggcccgggggaggcccagcctctgtctgcagggacctcacagggtgggctggcgtggctgtgattgggagagccaggatggaggtgcctgtgttgggaaaagacgcttgaggacagcgcttcctggcgggctctgggatcttctgagatcctgatgtctgccaagagcaggaggacagggaggacctcccctcctctgagaaggagatggaatgttctggcaaggcctctggacagtcagctcattaggaggacaaggtttggggactggcctttgggtctggactgttgtcccctggagccctggtcaggtgtcctgagagtggtgggtgcagatccaggcctgggggtggggaggggcctctgccttgaggaggtggatgtggaatgagggtcactggagagtgaaggacacttggggtgggcaaagccagcctgtgcttgggaggtcatcaggcaggacaggccctgaccccggggcagggaccgtcacaggtgagctcctctgtcttggggcctgagcccagcatggcctgaagctggttctcaccaggaaccagcaacatctcccagtgtccttccagcctctttcagctggggatgaggctacggcagcctgggacgggctttcatggtggcccagaaagcctatagcgctagggaggctcactggaagctctcctgtcatagcgtagcaggaggtgagcaggcccctggtcaccagaacctttctctgttgtcctacagggccagtcaaagcagcaagccgagaaatagaaatgagacgtgaacctctgttattcgcaggtgacacaattgtccacctaaagatctgagtcactgccattgtgactgtcactggccatgtgcaccggctggacgtgggataaactcacagcccccaacagcccctccctgcacacctgcctcgccattgtgatggaaattccatctgaacctggggcctccagcacgtgccagtcactccgccctccatggctgttgtcaaacaagcccctccgacctctcaggggtgatgtctgtgaagactcagctcccgacaagagcctctcatctgaagacgcagggcagtcagcactgggagccagggtgagagccgaagggaagccgaggcagcggcgttccctaatggagtatgagggggagggtcccacagacctggagctgcaaattatagcatgtgactgtagtgacagcttcggtgatcttagaaaatgaccccctagtagcactgatgatgaagctggtgaggtcggagcatgtggctgcgccagggagcattccaagcacttggcatctattaattcactgaatttcggcattaacttcttgtcgaagttactatggacagacgcggaagcttcagcagagaggttgagcaatctgctcaaagccacacagaaaacagtgacagaaccaggactagaagccagccggtctgtacataggatctacattctcaaccagtgagtctccgattctaaaaataaaaaatgttgaagatgaaagacagcaagtcttcaataccaaatttaataccaaacagctggattaaaaattcacatcagaagcagaagagcaaaactaataccacagagaatcaattcaattttaagtccaaacatgagttcttccaaacgccgaggtaaaggataaaattcacaaatataatgagagaaaagataacaaacagagtgtatatttagctgagacaaaacctgaaaattcaattgctagggagaaaaaaaaataagatcaaagtaataaagaaataattgaggatcaggtattctgggctgaatggacagaggtgtgtgtatttggagtagaagaacttaatgaatttcaagaaaatcaggccacctagacatgcattgacgagtttttcaatgtagaagacctaagaacaggcctctcacaggcaagacgaataatacacgatctggaaatgaactgcctcaggctgacctcagacccctgtcccactaaccagggtatggcaatatcctcagggcttccagggcaatctttggtggactaaggctctaattttccttttttcaaattattacatctttctcaaataaagataacagcgatgtattttcacaaaagcaagagcttagaaagtactccacccaggtatccctcttggaaaaaatgcttaaggaaatatgacaaatggcaaagtgattgttatggatggaatgtttgtatcctcccaaaattcacatgttgagaccctaattccaatatgatggtattaagaggtggggcctttgggaggtaattaggtcaggagggtggagccctcaaaaatgggatttgtgccctttaaagaagaaaccgtggagagattatctgggccacgtgaggacagcaagaaggtggctgtctgtagaccaggaagagagccctctccagagcaccaccatgtggcaccctgactgatcctggacttccagcttccagaactgggagaaagaaatgcctgctgctcaagaccctccagtccacggcaatttgttatagcagccccaactgactgtgacagagaagaagcaaagacaagagttccagaacgtagaagctggggtatcaaagggctggcccagatacaaagacaggaagacactgacctaggtccagataaccaatgtgctcagttataactgcaaatgcaaatttcacatattttataacagatgcatacaacagatgcatattctacatcctaattgaatggcagtgataatattctaatactttactgcatgctagtgtgagaggccgctaaccacacgtggctcttgagtgcttgaaatgtggctcatgccagttgtggaaatggtaacattctggatgtaccgggttaaataagatctattgttaaattaattgcacctgttccttctgccatctttaaatgtggctgttataatatttaggattgtatgtgcggttctgtttctactggaatatgctgtatgttgttttcaatcaaacaagaaagactgagaagcgggtgggggtggaaccgtgggctgatgttgaggagagcaagattaattctgttttaaatagaaattctcgaattgcggttccattcctcactttaatagttaaaaaataagcataaaggtaaacttaaaagctatttattggtacaattaaaaacagaatgtatatttttcaaaacagcaaataaaagtagaagagaaaaaacaaaccgtggtggatatcctaaagacggaaaagcaaccgaaacaggcggaaacctcaaaagcagagaagaccatgaaaacgtgaggaggagcaaaacagccagttggaaaggaaaggaaattgctcctgatgtttcctattagatgagaacatttctcaaaacggtttataaaataaaaaccgaaataaggtaactaatgtcaccattaaacagtaacgggagggaaaagagacgtctcccaggtccgacggctgccggggcccacacagagcctcctctcccatcctccccaaggggtgacggcacacagcctagaaatggggactcccgcactagcagggcccccacatcccacaggatgagccaaagggagggcagcctggctcaggactccctgaagatgcagaagccgtgttcccttacagagtcccacccagtggggagacgtgggcacttggctaggccagctggccaagggctgtgggagatgggcggtgaagggcaccaggatctgggagccctagtgtgagaagtcccctcccagtccttatgtggtgagtcccccaccccggccacacacacatcccaccccccttcacaagcagggtagaggctgcacacacacagtcatggggctcagggcaaggcagccttgctctgggctactgatcagacccaggacagagaggtctggggacagcccttcctgccatgcctgctccccttgtcctggtggctgggctgggagcttgcaaaggaaaatgacagtgacaaggggcctgtgtccttctgtcctggaagcctgtgacactcggacagggacttccaactgtgtattgcatttgcacagacatgccatcgaaactgcaaaggagtaaatgactgctgggacaagttaatagatacagcggttcaaaggaaaagacctactcaagaattaaggaatccttgtgaacaacaggggaaggttacagaaaatttccagttattcttaagaattaagaagtcgtgccgggcacggtggctcacgcttgtaatcccagcgctttgggaggccaaggcaggcagatcgcgatgtcaggagttcaagaccagcctggccaatgtggtgaaacccagtctctactaaaaatacaaaaattagccaggtgtggtggtgcacacctgtagtcctagctattcaggaggctgagggagaagaatagcttgaacccgggaggcagaagttgtactgagcggagattgctccactgcactctagcctggcaacagagtgatacccgctctcaaaaaaaaataacaacaacaaaaaaaaaaaccaaaagaccgggtgcagtggctcatgcctgtaatcccagcactttgggaggccgaggcgggtggatcataaggtcagaagttcaagaccagcctggccaagatggtgaaaccccgtctttactaaaaatacaaaaaaattagctgggcatggtggcctgcgcctgtaatcccagctactcaggaggagaggcaggagaatcccttgaatctgggaggtggaggttgcagtgagccgagatcgcaccactgcactccagtctgggcaacagagccagactccgcctaaaaaataatagaagttgctccagggattccagttctggaaacctgttgatgagattgtttgacccatcatcctgctgaaaacaattgaaaacactaggaagaatcttcctagttgcaacaggaaactggaaaaggaataaagaattacaggattacaggcccaaatcaaagacaggggtctttgccctttttgcacaagggaacttcccggccacctcgtgaaagctttggaggttttcagataagtaaaaggaaaccaacttcatgaaaacactgctgttacactatgaaaaagtgaactggtgagatagcatgtacttccctagggagcatgtgcctggtgggacccagcaggtgcatctcgcgctaccataattatgaaacagcagtggccagaatgaggttttgagcatttgcggccggcataatgtgacgccacgcatctcattcctgttggtgacaaagctgcaggtgctgccataggttttgtcggctacatgagagggttcctcacataaggcaaaagaaaacacacctgtcttagaggcctcaaaaatgcccacaaatactttccaaggacaaaggtggttactcagctgcaaacagtgaagcacacaaggaaacgacaccatgagcgagaactggtggaaatgacagaaagctgaaatggacccacagagacttcaggcattgggatgaccgtgcacagatatttgaaataagagatcagctctaaaatgtcttccaggaatgagaaatatttattttatttaataagagagggctggtgagaagatgatgagtgggggtcagacaggcagaggaaggagagagggggaggagctgagcccagggagaggccgggccgggtgggtgtgggggattcacagagaagcacccccggggcctggagacgctgaggctggcaggagaaccccacaacagcagaccccgcacagcgggaagtcaggactgcctccgcccctggtgctgtcagcctggatgcagctcaaggccagagtcccgaagctcccaccccacgcggcacgttgaagttcttcccacagggtttgccagatatgcaaaaaagacctctgagagggcacattggtgactttatttgttgacagactgatcactcacatggggcaggacacagtgaccaccggctggccagcatggagatgagggtgtgggagagatgcatgcctggagggaatcggcatgaaagctcagcattgctggctggaggtgcagtggctatgggcagaggagactcagacagggctcagggctgcaaggattttcggaagtcagagatggccctggaacaactctggagaaacgggacctgcccgtcagcagctggacttctggcctgaggagaggccgcagcacgcggaagagaggcgggagcacgtggggcggcagaggagggacacgcaggaggccgggcggcagcagctgggctggcaggtggaggcaggggcacagcaggaggggatgggcacacagcaggtggacctgcacacggggcggcagaggagggacacggaggaggagggtctgcagcaggaggtggtgcagcaagccggctggcggctagactgctggcagcatgaagaggaagccccagagcagacgggcacacagcagatgggcttgcagcagacaggcttgcagcagacgggcacacagcagactggcttgcagcagacaggcacgcagcaggcctgctggcagggggaggatgtgcagcaagctggctggcagctagactgctggcagcacgagggcgtgcaggagctggtgcagcctgactggcaggggctgggctcacaggccgcctggcagcaggggctggacacacagctcactggggtgcagaccagggtcaggcagggggccggggcgcagcagctggtggcgcagcaggggggctcacagcagctctctgggcaggcgtccacctgccaggagtcagagtaagcgctggagcagacggacatggtagacgtggccatgctggggtggggaggaggtgagctgggggagacgtgagtgagtgagtgtgggagtgagtgagggagtgagtgagtgatcgtgccaggcctctgagtggtcggaacctttatacccctctgtgttgattgtgctgcccctgcctggcttcgagaagccttcctcttccttgttgttgttgtaggcactgttgtgttagtagtgttggttcattgtttgtggatgttctggtttgtgaggctcctgactggagttagggcttccctaatgtgggcttgtccacagagataaactagtagaaatatattgattgcatcaaagcacactgcagaagcagggacagtggcagttaggagatattctggaattgacagccctctgctccatcccaggaggagtttgcacttaaaaaaagacttctacacctaaggagggatgaggttaggagaacctcagtttctgggccttgaggaaagggagagatgtgttctgctgtggacaagtttgaagatgctcagttggcctggccacacggcgagatccaccctgtgggttgacactgctggttgtcagtgggaaccatggggcatatttctgctgggggtgagccctggggcaggtgtgagggaatagtgtcttcctgggcagagattggctcgcagaggggagcagggaggcagctgcaggcccagcacagtagggatggagatgaggggcaagcacctttgtttcatttcacgttgaactgttatggggccttcccccggtggtgtgcacaatagtgttcacaccttctcctctcacatctcgggcaacatcacctgcaatggtgtccttgggagctccaaggtctcttcccttatgggccagaaagtcatcagaatgtattagttctactgttggctcctggacattgtcatagtaaatgtacaaataaaagggtctgattgcagagccttgtctcacaaatacctatacacctgtgtgtatcagcccatgcctgtgcccgggaccatacctgtgcgctagtaagcccccaaagttctgatcatggatccctcatctcctcactctatgatcgctattttctactaaatctttgaaatggcaaaggcagaggctctgatgatgctctaggctgcagggctttccaaaattaggccaggggtccactgagtgcttggtgggggcccataggctgcagggtttgaagcctctgacctttgatgagtatggctaagggctctgttggaggactacctggcaaagtcagactacagtggaaaaatattatttcatagaaataatagctggacacagactggcaaattggatgaagagtcatgacccgtcagtgtgctgtattcaggagacccatctcacttgcaaagacacacataggctcaaaataaaggaatggaggaaaatgtaccaagcaaatggaaagcaacgtaagcaggggttgcaatcctagtctctgataaaacagactttaagccaacaaagatcaaaaaagacaaagaagggcattacataatgataaagggatcaattcaatgagaagagctaattatcctaaatatatatgcaccaaatataaaagcacccagtttcataaaacaagctcttagagacctacaaagagacttagactcccacacaataatagtgggaaactttaacaccctgctgtcaatattagacagatcaatgtgacagaaaattaacaaggatattcagaacttgaactcagctctggatcaaatggacctaatagacatctgcagaactctccaccccaaatcaacagaagatacattcttctcagtgtcacatggcacttattctaaaattgactttataattgaaagtaaaacactcctcagcaaatgcaaaagaactgaaatcataacaaagtctaccggaccacagtgcaatcaaattagatctcaagattaagaaactcactcaaaaccacacaactacatggaaattgaacaacctgctcctgaatgactcctgggtaagtaacgaaattaaggcaaaaatcaagaagttatttgaaaccaatgagaacaaagagacaatgtcccagaatctctggaacacagctaaagcagtgttaacagggaaatttatagcactaaatgtccacatcagaaagctggaaagatctcagatctacaccctaacatcacaattaaaagaactagagaagcaagagcaaacaaatccaaaggctagcagaagacaaaaaataactaagatcagagcggaactgaaggagatagagacatgaaaaacccttcaaaaaaatcaatgaatccaggagctggttttttgaaaaaattaacaaaatagatagatcactagctagactaataaagaagaaaagagggaagaatcaaatagatgcaataaaaaatgataaaggggatatcaccactgatcccacaaaaatacaaacggccatcagagaatactataaacacctctacaaaataaactagaaaatctagaagaaatgggtaaattcctggacacatacaccctcccaagactaaaccaggaagaagttgaatccctgaatagattatagcaagttctgaaattgaggcagtaattaatagtctaccaaccaaaaaaagcccgggaccagatggattcacagccaaattctaccagaggtacaaagaggaggtggtaccattccttctgaaactattccaaacaactgaaaaggagggactcctccctaactgattttatgaggccaccatcatcctgataccaaaacctggcagacacaacaaaaaaagaaaacttcaggccaatatccctgatgaacactgatgtaaaaatcctcaataaaatactggcaaactgaatccagcagcatatcgaaaagcttatacaccacaatcaagtcagcttcatccctaggatgcaaagctggctcaacataggcaaatcgataaatgtaatccatcacataaagagaaccaatgacgaaaaccacatgattatctcaatagatgcagaaaaggccttcaagaaaattcaacatcccttcatgttaaaaactctgaataaactagatgttaatagaacatatctcaaaataataagaggtatttatgataaacccatagtcaatatcatactgaatgagcaaaagctgaaagcattccctttgaaaaccagcacaagacaaggataccctctctcatcactcctattcaacatagtattagaaattctgaacagggcaatcaggcaatagaaagaaataaagagtattcgaatagaaaaagaggaagccaaattatctctgtttgcaggtgacatgattctatatttagaaaaccccatcatctcagctcaaaaattccttaagctgataagcaacttcagcaaagtctcagcatgcaaaatcaatgtgcaaaaatcacaagccttcctacacaccaacaacagacaagcagatagccaaatcatgagtgaactcccattcacaattgctacaaagggaatgaaatacctaggaacacagctaataagggatgtgaaggagctcttcaaggagaactacaaatcactgctcaaggaaataagagaggacacaaacaaatggaaaaacattccatcctcatggataggaagaatcgatatcatgaaaatggccatactgccccaagtaatttatagattcaatgctattcccatcaaactaccactgacattcttcacagaattagtaactttccaaaattattgaaaaacattaatctacatatccaggacctcagaaaactctaaggtggagacacacaaaagatacgcaaacagacatatcatagtaaaaatactgaaagtcaaaaacaaggagaaaatcttgaaagcagcaagagaaaaacaagttatttataagagaaccataagaagagcaacagttcacttcttatcagaaacaatgggcaccagaaggtagtatgatggtacattcaaagtgctcaaagaaaaaaaagtcagccaagaattctatatccaacaaagttgtctttcagaaatgaaggcaaaataaaggcattcccagataaatcaaaactgagggaatctattacctgcagatgcatcttacgagtcatactagcgttccgcagaccaaaagcaagtaactccagacagaaattcaaatccacacagaaaaacaaaacagcagtaaaactaattatgtaattataaaaagtagtacaaatgcatattttctcctttattctcttaactgatttttaaaaagcaatataaaaaggtatatttggtgttgttgggcctataacatatagaaatctaatatatttggcaataataatacaaaggaggtacatggaaacaaagctatatcgtgcaaaggaagttactgaagatagtaatgtgaatccacaggaaaaaatgaagagaatcagaaatgataaaaaggctaatataacaaatgatataaatatatacttgttctttcttctctgagcatctttaaaagccataaaattataggaagtaataagtataacaatatattgttgggttttaacatctgtagatgtaatatatataacaacaagactacaaaaaggacaaaaaggaaaagagttgtataggagcaatctttttgtatctcactggtattaagttggcacaaatctgaagttgatcttgataagtcaaaataagtatatggtaaaccccagagcaaacactaaggaaaaactaaaacagtgtcatgggaaaacataaagaaatcaaaatgctacattaggaaatatgcacttaatataagagaaagtagtgaagaaagaatataaggacagtggtgacaaaaaaaacccataaacccacagaaccatataaaacatatgggaaataaaaagtaaactagtagacataaattcaagtacagttgattttcattgttagtagtaattacataaagtcattgcaaatactgaattaggaaataatataccattgttcctaggggaaatacagagtttggttcttgtaatcctctggtcgcagtttcaactatcaacatatagtcgagtgttatatatgtttaataattattgtttattcattaacattgaactcagccaacagtactacaacttatgccttaacaaagcttctctaacatacatattttctctgtaaggcacatcacagcctttttgcacttaggaacactgaacagccccttcaccaccatgcctgagggccattttaaacagtaaagtcacccaaaaaatcacaaaaatgtgaaaatgtggcattaagtagattacaaaaaaaaatgcttatttacaatatgagagctgaagcaagaatgcagagtgtgccttgttcaaccttatctgggaacatgcattttgggagactcaaatttctcactaatctgtgcatgccaatgaatgaccacaaaagtgccaccagtatttgagattacaaattaattttagagagtagctgaatttgcaaatacaaaattcataaaaaatgaggtcaactgtatatcaataacaacattaaatgtaaatagattaaataacccagtcaaaaggcagaggctgtcagactggattaaataaaaaacaagatgtaatagatactctgtaaagtaggcattctttatattgcaatatacaactagattgaaagtaaacagaaagagataaactatacaaacaacaaccatgagaaaattggagtagcccaactgctgtccgataaaataaattttaaaacaaaaattgttactagagattaagaggaacactttataatgataaaaggtcaacctatcatgaaggtataataaatataaacatgtatggaaataataaaagagcaccaaaatacatgaagcaaaagctgacagaaatgaagggagaaatagacaagtcaacaatattaattgaatagttcaacaccgtaatttcaacaaacggatagaataactaggtagaagatcaacaagaaaaaggaaaacttgaatacaataaaccaataaagtctagcagacacctttagactgttcccacctgatgacagcagaatatacatttttttgaaatgcatatgcagtatcgtctagcataggacatatgttaggccataaaataaacctccagtaaatttaaaaagacagaaataatgcaaagtatgtattctggccacaataaaataaaattagaaatcaataatagaaaaaaaactggggaaacacacaaatatgtgaaaattaaacagcacactcttatataaccaacaaacaagtcaaaaaagaaaccaaaaggaaaatcataaaatcatcaagatgaataaaaatgaaacccaaaataccagaacttatgagatgcagcaaaagtattgcttagagagaagtttatagttgtaaatacctgtattaagaaagatctcaaatcaataacctaacctactttaagatgctggagaaagaagagccaactcaaagcaagcacaatgaaggaaataatgaagattaaagtggaaataaataaagaattaaaaccaattcttcacaaaccctttcaaaaactaagaggaagtattacttcctaactcattctatgaggctagtattagtctcataccataatcacacaaagacatcataagaaaagaaaactacagaccaataccactatctctcatgatatgaacgcaaaatactcaacaagatactagcaatctgaatccagcaacataaaagaagagttatacaccatggctaaatgggatttatccctgggatacaagattggtttaatatctaaaaatcaattaatgtaacacaacacatcaacagaataaaaaacaaaaatagcatgattataacaatagatgcagaaaaagcagttgataaaatccaccatcctttcatgttaaaaacactcaataagatagagcaggaaacttgctcaatttgttaagggcatctatgaagaatccacagttaatattatacttagtgggaaaaaataaaaagcattcatattggaaaagaagaaacaaatcatctctattcacagatgatataatcttatatatagaaaatcctaagaaattcactaaaaagctgccagctcagcaaggttgcaggatacaacgtcaacacacagaaatcaatggtatttcaggccaggtgtggtagctcatgtctgtgatctcagcactttgggaggcccagaccagcctggccaacatggcgaaaccctgtctctactaaaaatacaaaaattagctgggcatggtagtgtacacctgtaattccagctactctggaggctgaggcgggagaatcgcttgaacccaggaaatagaggttgcattgagccgagattgcaccactgcattccagcctgggtgacagagtgagactctgtctcaaaattaaataaataaataacggtatttctatatatttgcaattaacaagccaaacatgaaattatttataatagcatcaaaaaggaaaaaatactaggactagatttaacaaaataattataaaacttatactctgaaaactataaaacattatttttgttttgttaaggaagatgtaaacaatggaaaagcatcatacgttcattaatctgaagtccatgatccactcatgttaatattgttaacatgacaatactccccaaattaattacagatttgtccaatctcaagctaacttctctgtagacattcacaagttgattataaaatcaatatgtaattacaagcgatccagaatagccaaaccaaaatttaaaaagaggaacaaagttggatgactcatagttcccaatttaaagatttactacaataaatcttggttactacagtaaccaagactgtgtggtacaaatatataaatagacaaatgaatgaataaagtaaaattgagagtccagaaataaacccacctatctatagtcaatttatttctcacaaggttgtcaagaccattcaatgaggaaaaaataatctccttagcaaatggtgtgggggcaactgaatatctatatacaaaagaacaaaattgaccccctacctcacaccacatacaaaaattaaatggattgaagactcacatgtaagtaccaaaagtataaaactcttagaagaaaacataagggtaaatcttcatgaccttggatttggcattggattcttggatatgatatcaaaagtacaagcaacaaaataaaaaaaatagataaattgaacatcatcatggtttaaacattttgtgctccaaagggctctaccaagaaagtaaaaggaaaacccacagaatgggagcaaatatttgcaaatcatatatctgataaggggctcatcaaatacataaagaattctttataactgagcaataagtccattaatccacgaaaaactgggcaaaaaatttaaatgaacatttctccaaggaatatgcacaaatagccagtacacacatgagaagtgctcaacaccactgttggaaatgcaaattcatttttatttacttcagaaggacctgctgcacagatatgacgtgcactgtcccagaaaccgtggggaaggggacagagacaaacattactgtcttcaccttccaaactagtaggcagaggatgggatggggcttgtctgttagatttgggattgatggcacttcaagtcttagataaatgggtctacaaagtgtccctttttagatgtgattttattgttagcgcttcctgccaaaggatgtcaacataaaaactctgagcactagtccctcgattgcaggaattggctgtgcaaaccactagcaaatggtcacacagactctcacatactgccagtgacagggacctcactacctagcaaggccagccactcttgatcccagagaaacccagagagtccttgacaaatgccgcccctcaacctgtgcacgcgttggtactgggaacctcacaagggaaaattacgctattataacacgaagtgcagaaagtgccactgaccttgggtggaagattgggaactctcaaagttacgacgatggaaaattcttcagggaagaggtcacactgggagaaaatcctggatgctgggaagctcatggtgcggggggcggctactgagagctggagtccccgtgcaccgtgaacctgaactatcctgatcccgcttgtggcgccatcagaagggaccacttccgccaggatgtccagggggcgcaggtctgtggcaaagaaatcacaggtgggttaggccaggacacccccaaaagtggatacccataacagccaacatgtatggggcatcagcgtggcaggcactttacatagcactatagcccctatgagctgtgaaccaaggttatctctgtttcagtggtaaggaaacagaggcaccatgaggtgtgcccgtgtggcctccccccacccctcctcctgctcctgggggatcttgcacggctgcctctgagctgcaggtaacattccacccatggctgctgttttcaagtcggcagccaggcactgtgcagggtgagctgtgcgggacgaaggaaggaacgcatggccccaccgcagccacgggaaccccaaaggaaacgcaggaagcggctgggaatgagaccaggcaggcccaggctcctgtctgctggcctcccttgggtccctgtgctgcccttgggtgctgtgggaggctggagctgccatggagctggcagtgcctgcccctcgtccccctctgggcgtgccaggggagtggataagctcctggggaacctgggattcaaagttggtgggaacataattgatgggctggcctggcctcctccgaggccaggtgacagggaggaaaatgggaagcatggagggcattcggggctagcagagggctgcagatcagatccctggcccaggctgagtggctgggagcagagcctgagactgatgcctggaccctcctcagctcggccactgcagctggccccagcctgggtaaatgccagggcgtggctgaatgaagcaggtgttcctggagctgtctccctccgtctggcagtcttgctgaggggcctcctgcctcagcctggcatgagggtgttgggtcagtccactctggcaccctctagggttcatcttcccccacgtgcccatcctggccggcattgtgtagggaatgtcatggattctctgtgaaggccccggaagggctttggtcaaacatctcaagcagaggccttcctcccccgcctgcctgcacgtggcagggccccagtgagcagctggagagcaggactccactccaggccaggagaaggcacagcccttccttgcaccgccacgtgcatcgcagtgccacagctgcagtgagacttcgatcctctgtgtcctccagagagtgtgagcacctgggatggagcagttctgcagaagagcctaccctggaaaagcatcctggtccgcacacgcgcacacagggtgtgaaacgcagggtgtgatgggcacttctttcttagaaaaaccggatgtgatgcagccgtgcacgtccgcaagtgtgcacacagggtgtaacgggcacttacaaaaaccggatgtgacgcagacgtgcagtgcaggaacagccggcaaagcagccgtgagcaccctggctgcaggacgctgcctgggcctggcccaggcacagagtgggaagatgtggcaggacacaccatgggccaaggatggaaaggatgcagagggtcctggctggggcaggggtgtgtgtgtgtgtgacccacagcaccagagagtttggggacatgcagatggagggagcacagtgaagaaagtgtggcctgctttaggacaggagaatgtattattattgttactatttatgcaattaaacacaaaaggtagagtgtgaggaggctttgccgcttcttggaaagaccctgagttataaaacatgccacgacatagggacagcaacagtggacactgtgtgtagagaggtctgtgtacagggaccacccccgatggaggctgctgtgtgtgtttagggggtcccaggctgactctgggaggattctggcatcttggtgtggggggattctgtgcctcagggctctgatgttggcccaagcctcaggctggcggaggttggggatgagactccacatactgtggcgttgcgtcctgggtcccctggaaagaatgggtctctaagtaaaccccatgcaccctactgcccctccccccagtctcagagagacactgctgcacagcactgcctggtgctgggctcacccctgggggtttagcttgagcacgaccaggggccacctcctcaatgaggaaacgtgggggccaccatccagaaggtgccctgcccagcactcaggatgagcctctgccctgctgagccccgggatagacagtcagcccatcgctcgctgggctttggcaatcaggaaacagaatcctgaccatcccagcaagagcctctccctccactgtttaattaaaatagcctcttcctggctccggaccccacgcctgcagtgttgtgtgcctctcagcctcctgggagtggacacccaagggcagatgagtccctgacacagcctcggcagtgctgggtgggggcctctggatgttgacctgccctcacagccaccttgtggggcatcctccttgactctatcatcggtgagacatgggtccagaagccaggaattatggaattacagaaggggctgcagagataagctcgttcacagcctcaggcacaggccaggtatagccactgaggatggagaaggagggaaccgggcgctgctttgaaaagaagaaaggtattgaatccaacataggagctttgccttgagaaactagagaaagatgaggaaatggaacccacagcaagcaaagggaaggatggggcaggagtccacgcaattgaaaacaaaaggaaaatagaggaaactgattaaacccaagctggttctttgagatccatcaaattgataaacaatatggagaacaaaaggggatattgctaaacaattgtcagaaattaaaaggctgataagggaactccataaacaacaccacgtgttgtttatcaaaacctcagataatgtggaccaattccttgataggcgcaaataccagaacttattaaagaagaaaagataattgggaggtccaatatctaataaaggacaccttccaacacagaaaaactacagtttcctggaaaatactaccaaccctttaaagaagaaaaaatgtcaattctacatcatctctttcagaagatagaataggagaaaacaccaactcttttcatgaaggcagtgttaccaaaccaggcaaaggcattgcaataagagaaaactacagaccaaccaaaatcctcaataaaatattagcaaatacaatccagcaacatgtaaaaaggacaatacgttgtagagatggggtctggctatgttgcccaggctgatctcaaactcctggccttaaataatcctcctgccttggcctcccaaagtgctggaattacaggcatgagccaccacatccagcctagaggggaacatttcagaccagataacactagtctggaaaaaccagcaccaacacgattcttagtggggaaacccctccctctaagatcaggtgggtgttaatgcacatgccagcctccttgctctgtctcctgggagggctgggaaagcaacaccccagtagtgtgagcacaccttgctccagattttggtttctaaatgccttcgtccaccaagaggaagcagggcttcctagagaagcgtctgattccagggatgaaacagggcaaatctgagatgaacttggacccaaaagtaagaaaggtcagggagggacagcgtgttgaaagggcaccagggccaaaacgaaaggacttgagggccgaagttggaaccactgcaaccacaaaatacatagtgatcatattggattatagctcaagtaatagataaacattctttagtccacacatagataaataaataaggaagcaaatagacacacagaagagcgggacagctcctcctcccgggagaatttcaattagtaagtgtggaaggaacaaggcagggaggagaatcctcaacagagccccacagggaccgtgcgggcgaggcccccggaggggcaccagcactgccgggcaaacgcctgggcagacgcaggacagctgccaagtctcagacatgaccaattacagagggaaacggcggcaccgcgagggatgggccgcggccgtgtcacctccatgccccacgcacactgctcctgtgggattcctcccccaacgcgatgcccactctgaccacgaggaaacctcaagcaagtccacgtggaggggcattctacaaaacacccaaccggtcaaggtcgctgaggccaaggagagattgggcaaccgtcacaaaccagagaagtcgaggagacctttcagccaacgccatgtggggtcctgagcaggacccaccggaagttggtgcagctgcctaaagaccgtcctggctgagaagaaacagagcagcgctgctttctcagagctgggaaccaacctgcggtggtgtcgggaagctggcaaagggcgatgtgaaccccgcttttcagccactattccctaaaaccattccacgaggtcaagccacacctcacaagcaaaggctgctgagtgcccagtgctgggcacctgctgtcctgtgctaccctcgccaccccccatgctccacctgccccaggcccaagtccacaagaaacacttctgccgtgcttgccttcccatcccgggttctgctcccgtgcccacgtcctcatcccaggttctgccattgtgtctgcttgctgtggattgaattgtgtccctcaaaaggtgccgaagtcctgaccgctggtacatgtgaatgtgaccctatatggaaatagggtctttgtaggtgatcaagttaagaggaggctgttaggataggccctactgcaataatgctttgtatccttataaaaaggggagatttggacacacacacacacacacacacacacacacacacacacacacacacacacacggagaagctgtgtgaagataaaggcagagctcaggtgaggccactgtaagccaaggaccccaaagatagcagcagcccacaggagtgaggggagcggggtgagacagtgcccctcgcagcctcagaaggaacccatgctgtccactgtccacacctcgatctcagacttctggcttccaaaaccatgagacacggaatttctgttgtgtgaccagccagtttgtggtactgtttgtcatggcagcccaaggaaaagaatacattacagcatacaaaccatgactcacattatctttacttagaacccaaacaaacctctctccctaagctttcaatcacagaggcacatgatcttgttcagcagcctagaaaaccaaggcccagcggagccacccgtaggcacccactccccatagcctggcacacacacacggcagagccacccacaggcacccactcctcatagtccagcacacacacggcagagccacccgcaggcacccactccccatagcccggcacacacgtggaccatgccaccctccacgtgcgcctggggagcaaagcagcacagcctgaactgcccctcagctcttcctcctgagtctaaaacacgcacatgcgccccaggccaattccaagttttgtaaactgagcaacagctcttgggaaacaaaaacacagctactgtttattctcctggagctggctgtacaccccaacaaggaagggagggcttgctgagcctcctgtctggacaacatgcaccaaggaggagtataaaagccccacaaacccgagcacctcactcactcgctcacccactccctcccatctcccccagctcaacccccagcacagcagcatccaccatgtccgtctgctccagcgacctgagctacagcagccgcgtctgccttcctggttcctgtgactcttgctccgactcctggcaggtggacgactgcccagagagctgctgcgagcccccctgctgcgcccccagctgctgcgccccggccccctgcctgagcctggtctgcaccccagtgagccgtgtgtccagcccctgctgcccagtgacctgtgagcccagcccctgccaatcaggctgcaccagctcctgcacgccctcgtgctgccagcagtctagctgccagctggcttgctgtgcctcctccccctgccagcaggcctgctgcgtgcccgtctgctgcaagactgtctgctgcaagcctgtgtgctgtgtgcccgtctgctgtggggattcttcatgctgccagcagtctagctgccagtcagcttgctgcacctcctccccctgccagcaggcctgctgtgtgcccatctgctgcaagcctgtctgctctgggatttcctcttcgtgctgccagcagtctagctgtgtgagctgtgtgtccagcccctgctgccaggcggtctgtgagcccagcccctgccaatcaggctgcatcagctcctgcacgccctcgtgctgccagcagtctagctgccagccggcttgctgcacctcctcctcctgccagcaggcctgctgcgtgcccgtctgctgcaagactgtctgctgcaagcctgtgtgctctgaggattcctcttcatgctgccagcagtctagctgccagccggcttgctgcacctcctctccctgccagcaggcttgctgtgtgcctgtctgctgcaagcctgtgtgctgcaagcctgtctgctctgtgcccatctgctctggggcttcctctctgtgctgccagcagtctagctgccagccagcttgctgcacctcctcccaaagccagcagggctgctgcgtgcccgtctgctgcaagcctgtgagctgtgtgcctgtttgctctggggcttcctcttcatgctgccagcaatctagctgccagccagcttgctgcaccacctcctgctgcagaccctcctcctccgtgtccctcctctgccgccccgtgtgcaggcccgcctgctgcgtgcccgtcccttcctgctgtgctcccacctcctcctgccaacccagctgctgccgcccagcctcctgcgtgtccctcctctgacgccccgtgtgctcccgcccagcctgctgaggcctccgctcaggtcagaagcccagctgctgatggacacgccccccagtgccagccaggctcaggtcccacctgaaagctgatagtcgcgtcctgaattgctcctgcactttgaccatttcctggtgtctgctgttgagctggacaatggaagaactgaaagtctatactcaatgctgcagccctcttgcggggggaggggggcgcttctagaaagttcccatggcagtggcctcccctccatatctcccacctctcatgagggtcagttcagccttgacccgtgaggtctctgtcctcctggctcagagccgcagagccttctttggacgccctcaagctgaccaataaaggccctgagactgcaatggcgctgacacccaggtgtgttgattaatgccttggctggagctcacggccatggttttctcctttgtgcacaaccctctgctgtccttcaggcccctgagtgttttcctgtgcccaggggcgtgtggttcccaggggtccaggctagacggacatggacgcggggagccttgcagccctttggccatttcgggcccttgggtttgtccctaaccctcctgtgttgttagtcgtgtcatagttctttttgctgatttgctttttaaattatccttctgctgcacaatacttgtcaaataagaatggtgtcttctagcgccatgcttgcccagagtgtgtccaaatgcctccctagcttcaaaatcagtagtcttcatcgacattgcctaaaacctcttgtgccctgtgcagacatcactggcatggtgggaggaacacagacaggcgattggaattgggtctctgtcgcttcgcttccaccctgtgtgagcagaatcatctcctcgaccctccggcctctctaaggtcagggaagtaggactccctctttcaggtttccaaatggagtggcaagaacgacagacagagcacgtgtgaccaccatgagcccagggccagcggactgcccagagcaggatggtctgaggagttttgggcattttaagaagtctttaaaaattatatttggaataatgatgtgttgtaaccactggaagaagtgccaactattccaatggttataaaacatactcataaagcaatgacgataagatcagaaagaatttccatgcacaggtgtcagagggtggcccgggaactcagccgcagtggaggtggagttgtgaggacagacccagagcactggccacacggagtcacagtcccggagtggaagggagtgcataactcatgggtgaacagacacacggatgtcccagggtgggtgagggggcataactcatgggtgaacagacacacggacgtcccagggtgggtgagggggcaaacctcatgggtgaacagacacacggacgtcccagggtgggtgagggggcaaacctcatgggtgaacagacacacggacgtcccagggtgggtgagggggcaaacctcatgggtgaacagacacatggatgtcccagggtgggtgagggggcaaacctcatgggtgaacatgcccatggttttcagcaacacaactcaatgtgttgattgcaacccatggaagcagagagttaaaaataactccagagaaggggactctgtggaagagtcttcattaaactacagtgctgtttcccttcacgtgagctgagaacactgctggttgaggtcctttgtgtctttaccaaacctcactctgtcttcagaaagtcattttccaggaggtgtatagaaaagttgagaaaccactaaaaaccaagccgacttaagggatatttatacaaaatcccatccaacaacaatgggatgcatgttgtttaaagtgcacgtggaacatccaccaacataaaccaccggagaggcctgagagcaagtctcagtgtcctcaggagggatgaaatcacaggagggctgagcatgctgcttggccacacagaattggaaatcattaacagaaagacacttagaaaactgccacatacttggaaattaaataacacactttaagatctatgagtaaaaatataaatcacaatggaaattatgaaatatctggaataaaatgaaaatgaaatcaccccatatcaatacttgtgggatgcagctaacaaagcatgtagaggaaaatgcatagtaatttgttttattagagaagaaggcctaaaatcagttgtccgagcttccagcttaagaagctaaagaagcatatgttgaacccaaaaataactagaaataataaaataatcaagaatttaaaaactccactgtgtttgtccattttgcactgctgtaaaggaatacccgagactgggcaatttatgaggaaaggcccacggttatctggctcctggttctacaggctgtacaagaatggcacctgctgagcttctgctgaggtctcaggaagctttactcatggtggaaggtggacggggagcaggcatcacatggtatgaggggagcaagagagacagagaggagggagtgccaggctcttgtaaacaaccagctgtccatgaagtaacagagcaagacttcactcattattgtgggggtggcaccaagccactcatgagggaaccgtccccatgacccaatcacctcccaccaggccctgcctccaacacgggatcatggttcaccatgagatttggaggggacacatatccaccatatcacctaccaaatagaaagtggacaaacagggaaataaataaaaccaaacctagtttttttaaagacaaatgaaattggcaaatttctaactttactggtcattataaaacaagagaacaaataaattaccaatatcggatgttatggtttggctgtgtccccacccaaatctcatcttgaattctcacatgttgtgggaggcacctggtgggaggtaattgaatcatgggagtgggtctttcctgtgctgttctcatgatagtaagtaagtctcacaagatctgatggttttatacaggggagtttccctgcacaagctctcttctcttgtctgccaccaagtgaattgtgcctttcaccttccaccatgattgtgaggcctcctcagccatgtggaactgtgagtccattaaacctctttcttttgtaaattgcccagtcttgggtatgtctttattagcaccatgaaaatgaactaatacatcaggaatgaataaaaggttgccactacagaatctgtagatatttaaaggaaaccaaacaaataatgcaaacaactctatgtcaatacattcaacagcttagatgaaataggcaaatgactggaaatgcatcatttatgaaaagggatacaagaagaaatagaaaatcggaatagccctctatcaattgaagagactggactcataattaaaacccttcccacagagacaatgccaatcccgaatggctttgccattgaattctaccaagcatttaggggagaaataatgccaatctaacccaaacttttccagaaaaccgtggggtagacacagtgtcggcgagggtgctagggattaggggacggaggctgaggcctcacgggtggcagggatgcccttggtgggctctggccatggacacagactcctgggatgagagggggactcatggaggaacacccacgccttgaccctgagatggccttgcagggagggtaactgaaaatttacccactggggacagttgcctacttactaaaacagttccagccaccaccgcagcccctggaaggccatccccccagaaaatcccccaggtctcagcagggccttgtccacctgtgccctccagtgtcgcccatgtcaacctcacctaagaggggcctgacgcacggtcctgcaggtgcggactctgggtcctgaaagcccatgcggaacctggtgcccccagaggagggcctggggcagtgccagttttggggaatcatgtgcatccatccacccactccatgatgctttcgtcctgatcgagtcccttgtctcctgcgcaggtgcagcagcccctccctctccccccgcattgctgctaagcgggcagaactctcgggcgggcggcacacagggagggtgaccaggcctggaggctgcggtgcccggaccccaggccagcttcctggaaggtgaccctgcagggtgggctctcccaggtgggacagtgggtgggacagtcctggggcctggagagccccacagcccagggcacggcagccaatgaccaggctcaggaagacccaggcatggaggctgagccgggactgagccttcctgggcgtggctgtgagttccacctggtgaccccctggaggagttaggccactgtcccccgtgacttctaggttaagtcactcattcatagaaacagtcatggctagagaccaatctgagctcaaaaccatgtatccccaggagcactacagaaaaagagaatcaggcgaccaaggggagtttattggggagcaggaggaggtgctgacaggttcaagtcgaggccaagtgacatggggcagagaagctgggagggaggacaggggacccaacaggcaggtgggcccctgctgggaggcaggagctggggagcttcgaggatggagattcctgggagtatggaggggggggtcacctcagcacatgggggccccgtcccaagcgggggcaacctcctaacccgagtcaggaccagttggccctgggggatgtgcacatcagcaactggactcctggcctgagcagaggcctcagcaggccaggggggagcacgcggggcggcagaggagggacacgcaggaggccgggcggcagcagctggcctggtaggaggaggcaggggcacagcaggaggagatgggcaggcagcaggcgggcctgcatatggggcggcagaggagggacacggaggaggagggtctgcagcaggaggtggtgcagcaagccggctgacagctagactgctggcagcatgaagtggaagccccagagcagacgggcacacagcagatgggtttgcagcagacaggcttgcaacagacaggcacgtagcaggactgctggcagggggaggaggtgcagcaagtcggctggcagctagaatgctggcagcatgaagaggaatcctcagaacaggtgggcacacagcacacgggcttgcagcagacaggcacacagcaggactgctggcaggaggaagaggcacagcaagttggctggcagctagactgctggcagcatgaagaggaatccttagagcaggtgggcaggcagcacacaggcttgcagcagacgggcacgcagcaggcctgctggcagggggaggaggcgcagcaagccggctggcagcacgagggcgtgcaggagctggtgcagcctgattggcaggggctgggctcacaggccgcctggcagcaggggctggacacacagctcactggggtgcagaccagggtcaggcagggggcggtgccgcaggggggctcacagcagctctctgggcagtcgtccactcgccaggagtcagagcaagcgctggagcagacggacatggtgcacgcggccatgctggggtggggaagacgtgagctgggagctgggggaggtgtgagtgagtgagtgtgtgagtgagtgaaggagggagtgagtgagtgaggtgctcagggctgtggggcttttaaatccctccctggcgtgtgttgtcccgacaggaggctccacaagcttctcttccttgttggtgtttagagctggtggctggagatgcgtcattcatgctggtttatctgtttgtttttccctcattaaacttgtgtgtatgttgcagggccgtgtttcttcatcggttcttattttagccccagaaatgtggtggaaaatatttcaagcaaacttttgttgagtagaggttttagagatgaagacttctctaaagggaggaattctagtttcacctatcctgtgtttggactgattggatatattttattacttttagcatattaaaatataaataggtagaaaaatatgcatttcttataaaatgcagctggcacagagggtacgatgaagctaagtggccctctcttcaaccccttgtgcctcgtaaggggaatgctcagagatttggtatctggtggatctgtgctttatccttgtctcttcagctcttccatgccaccctcagagccctctctctgttttatttgaagctgcgctctgggttttctccatttttatttcctcatggtgacagatcaagtactttttcacatatggtgattttaggacatacattttaagatttctttcttgcctaaaaatgtactcaactttaccctcacacttatatgatagtttagctgggtatataattctggttttaagtcagaattattattataaataataacaaaaaatctgttttctcaaaatgatgaacctgtgtcaccatttttctgtagtgtccagcgttgctgatgagagactgaggttggtcatttgtcattttttatagtttgtctctctctctccgtttaactctctgggaacatttggttttctttttattcttcttttgtttctatgcgtgtgcattattttactttctgtggttagaattcattgagcctttcaatgtggagactcaggaagtgttttgcgctcttaaaaataactcatctctcaaggtctttccttttgtgactttaattttgtctcacgatgaatgaaatacatttttggctcactgtaatgatgttatgttgagcatttaaacgtttttcccctcgtttcactggacatcagttaagctctgctcattggtggcagttcatttgattttctgagtaaaagactattttattccagggcattggggtcctgatccagtttacattctaatttgtttccatctgtttctcttttctacaaatatataaaggattttaaagagcctccctttttgttagacaattttgattttattttttataactctttgaatatcctttcagtgattattagtagaggttgtgcgagaactgtgtgcttaacccactttctgggactgaaggactcgatgctcctttcaggaaatgacaggaaagccaggaaggctaggatgacgtcatatcagcgggtgtgctacagacatgcacggcgcaggtgcggtctccacatcagccaccgcgtgaggggtgactctgcagcccattttgacagttgcagaaatgatgagagaagataagtaaccttgaaagaggacagctggccggcagtgaacctgacaaccgcgagctctcactcctttccctcacggccatacatggctccgttctgtcacacagctcccagaagagtgcgtgcttcctgagtggcaggcagggaggcaggtggtcctgagccagcgggatgtggtaaggctgacatggcttctgggacaagccctggggcctgtatgataatttgctttagttttcccatcgctatctctggcagcctccttaatcgaatgggtgtggtgattccttgtctctttattcctatttgtgatccacgccctctgtcgctcccttctcctggtgtctggaccacccatcactgtccaaagtgtctttccacagtcattgctgtgcccacaacagctccagggtctcagtgtgcctgatctaagtccacgccctgcgctcagtggagacgtgtctttttggatcatggaaattttcactgggggccaccatggcagtttccacggacaattgaatgatcacaccaatttctttctttctctctttctttctctttctttcttttcttccttctttctttcttttcttttttgacacacagtctcactctgtcacccaggctggagtgcagtggtgctgcaggccccacctcccgggttcaagcgattctcctccctcagcctcccgagtagctgggattacaggtgtgcaccaccacatccagctatttttctttctttctttttttttttgtatttttagtagagatggggtttggacattttggccaggctggtctcgaacttatggcctcaagtgatccatccgtttcagtctcccaaaagtgcaggcattacagatgtgagccactgcacccggccagatcacatcatttcttaaatcaagcagacactctggggatctgagtgagctgagctgcagggattaaacagccctggctgggggagggaggtgctgggaggggatgtgagtctggagggcagggtggcccacggccgtgtcttctgcaagtgacacacgtttggattcttcttttccaaaatgtagtcttttgttttatttgactccctttcatcgtggctggctgcccagcacaactctggagacgcgatgacagcagccctctggtcttgtttccaaagttaacagaagcacctcctgcagctccgcactaagccggtgttggctggtttgtcgcaaagccttggtctcgtgcatgcagtgttttttcactctagtttaccaagaattttgcctcaggcttttaaagaaggagtgagtttgttcatgtatgtgtgtgtgtgaatgtgtgtgtattaatctactgagtgttccagtggcttttctacttctattttatgagtatagttaatgataccctttgtaacttgagtgatctaagatatacattacttgataatggctcattatccctttttccccagctttattgagatgtaattgacaaataagaattatataaattcaggatgtcttgatacatgtacacattgtgtgatgattaccacggtcaagctaattaatatgtccatcacccatgcagttacctttattttgtgatgagacatttaaggtggactctcttagcaaatttcagtgttactgcgtcacattctgtgttacagtcaactgtccccgtgctgcacatgaggtttccagaactgactcatcctgcacagctgaagctgtatcctgtcatcaacatcaaagtggataaagcacacagttcttgcacacctgtattaataatcgctgaaaggatatttaaagagttataaaaaatgaaaactccctgcacccccgcccctgtgaacccccactctactctctgctttgccgagcttggcttttttagattccacatataagcgaggtctgcagtatttgtctttctgtggcctgggtcacttcacctagcatagtgtgtgcaggttcatccatgttgccactaatgacaggatctccctcctttctatggctgaatcgtattccatcgtgtgtatacaccacattttctttatccactcatctgctgatgggcacttatgttgcttccatatcttggctgttgtgactagtgctgcagttagcatggcagtgcaggtatctctttgagatctggctttaatttgtcttgtatatacaagattgctcatcacatggtagttctatttttaatttgctgaggagctttgacactgtcttccataatggctgcatgtaacagcttagtttttctttaacataggcacatagaatctcttgctttatctttttaaatgggattgatttacagtcctctctccctctctctctctctcacacacaattattcctggttttggcatcagggtctcaccagtcttatattagaggaatccagaagatctctgtcttcttctgagctctggaatatttcaagtatcacaggaaggtcttatattgaaggctgatgatatacacctttaaaacatctgagtctgccttctgaagaatatctttcaataccatttccatattttcctggacatcattgtattaaaagtttcattttgttattcagtgttggtaatttatattttttagaacacagtccattcatttatattttcaaattttaggataaacatacccatgctactttcttttacataaaaacaaaaatctctcaatctgtgggcatgtttctttttcaatctttaatgtctgcttatttttattagactgtatttttattttctttagattttccttgatgagcatctgcggatttttgtggacatttgaaaagagggggtcgtgctccttcttgttagagattgttgagtaaaagtttcagaaagcgtcatgggtggtaaactttctggatccctgttgtttaagaacagccctcctgctgacacctgccacagcagagtctaggtgcagaatttcttccctccaccttagtagaggttgggccaccagtgtgtctcagatttgcataactttaatcttcttgtgaagcttttcctctttccagaacctggcactattctctccttgtacttcattcatttcaccagacccctccctagtcactgtcatcagctgtgttcatcccctcggtcccatcttcttttagttcaaggaacttttattcccatatgggtttgatgattttctttcattcttggcttctctccccactgtgatcccagaatcacagaccctgagtctcctgggttcatctcccttagacctcaggcttttcttggcttcatctctttgtccttctgcattgggtttcggtcattttctgaactgggggtcatggtgtcagctcttctgcctcagggtctgttatgaggactgccattgaattccatatgtttggagtgtcacgatttcagtctccaggaatccaaggtgttttcctttcttctccttctcctttttggtagcactctcttcttgtttcatggagtaacggcctctttgtttcatgcattattgtttgtttagactttgcttctctgtcatgctgtgatttcctcatgcgtctgaggacccttagttgttgttcacgtttttaagtgagggtctaaactgtttggctttcattgctgaaaggttctctgcatgtagacacatgtcttcttctcacagagctgacactggggctctcagggtggggccttgtctgccgctggctgagtacaggggctttggttcattttggcatccagaacttcctggggtgtggtctcttcctctccatcctaggacccaggctgggagcctcctgggccacccctggcctgcctggctctcctgctggactcagggcaccaggcggttcttctttagaactcaaccctcagttaaagacgcctgagtgcccatggctgtcctcatgtgctgtccctgtgtcagggtctctgggaaaagccatttgtcttcagtcctgcttctgcctttctttctgttgaattttacagtcaagaaaacccgatctttttgtcttgtctgtcgcagaaaatccttactgacctggtctgcagatggcatgcctgttttctatcactgttctggtaccactcatttttatttggatgaaggggaggtggaggcattggggagtagccagcccaaacagagggcttaggcttttaaaaaaaatttaccaagagaaaattcacaagccatgaagctcacctgctgcaaggacataatccatttgtttttagcgtattcccagtgtttctcagccatcaccaatatataattttacagcattcctccctccaaaaaaatcacaccaatcagcaccactccccatgtgcccctcccccagcctcaggcacctactcatctactttctttctctgtagatttgcccattctgagcctttcatacaaatagaatcccaccaggtttcgtaccagggatgcagggatggtttaacattcacaattcaacaccacataaacagaattaaaaacaaaaatcacatgatcaatagatgcagaaaaagctttcgacaaaatccagcatctctatgattaaaactctcagcaaaatcaacatacaagggacatacctcaatgtaataaaagccatctatgacaaacccacagccaacataacactgaatggggagaagttgaaagcactccctctgagaactgcaaaaatgtagggatgcccattctcaccacttctcttcaacatagtactggaagtcctagccagagcaatcagacaagagaaagaaataaaaggcatccaaatcggtacagaggaagtcaaactgtcgctgtttgctgatgatatgatcgtacacctagaaaaccccaaagattcctacaaaaagctcctagaactgataaaagaattcagcaaagtttccagatgcaaaattaatgtacacaaatcagtagctctcctatacaccaacagcgactaagctgagaatcaaatcaagaactcaatcccttttacaatagctgcaaaaaaataaaatactcaggaatatacctacccaaggaggtgaaagacctctacaaggaaaactacaaagcactgctaaaataaatcacagacaacacaaacaaatggaaacacatcccatgttcatggatgggtagaatcaatgttgtgaaaatgaccatagtgccaaaagcaattcaatgcaattcccatcaaaataccaccatcattcatcacagagttacaaaaaaaattctataattcatatggaaccaaaaaagggcccgcatagccaaagcaagactaagcaaaaagaacaaatccggaggcatcacattacctgatttcaaactatactataaggccacagtcaccaaaacagcattggtataaaaataggcacatagaccaatggaacagaatagagaacccagaaataaacccaaatacttaccgccgactgatctttgacaaagcaaacaaaaacataaagtggggaaaggacactctattcaacaaatggttctgggataattggcaagccacatataggagaatgaaactggatcctcatctctcaccttatataaaaatcaactcaagatggatcaaggacttaaatctaagacctgaaactattagaattctagaaaataacatgaaaaatcccttctagatattggcttaggcaaggatttcatgaccaagaatccaaaagcaaatgcaataaaaacagagataaatagctgggacttaattaaactaaagagcttttgcatggcaaaagaaacagtcagcagagtaaacagacaacccacacagtgggagaaaatcttcacaatctgtacatctgacaaaggactaatatccagaacctacaacaaactcaaacaaattataaagaaaaaaaccaaacaatcccatcaaaaagtgggctaaggacatgaatggacaattctcaaaagaagatatacaaatggccaacaaacataggaaaaaatgcttaacatcactaatgatgaaggaaatgcaaatcaaaaccacaatgggataccacctcactcctgcaagaatggccatcatcaaaaaatcaaaaaataatagatgctggcacagatgtggtgaacagggaagacttctacactcctggtgggaatgtaaactagtacaaccactgtggaatacagtgtggagattccttaaagaactaaaagtagatccaccatttgatccagcaaatccactactgggtatctacccggaggaaaagacgtcattatacaaaaaagatacttgctcacgcatgtttatagcagcacaattcgcaattgcaaaaatgtggaaccaacccaaattcccatcaatcaacgagtggataaagaaacttttatatatataatatatatatatttatttatatatttatatatataaactgatatatatgtgtgtgtatatatgtatatatatgttatatatatgtatgtgtgtatatatatgtatgtgtgtgtgtatatatatatatgatggaatactactcagtaataaaaagaaatgaattaatggcattcacagagacctggatgagattggagattattattctaagtgaagtaactcaggaatggaaaaccaaacatcatatgttctcactcataagtggaagctaagctatgaggatacaaaggcataagaatgacacaatggactttggggactgagagggaaagggcgggaagggggtgatggataaaaaactacaaatagggtgcagtgtatactgctcgaatgatgggtgcaccaaaatctcacaaatcaacactaaattactaatccatgtaaccaaacaccacctattccccaataacctaaataaaatataaaataaaaataaaaaataaaaaaccaaaatagaatgtcaccacatgtgggctctcactaagcatcatgctttcaaggctcatgcatgttgtagcctgtgtcagtattggattccttttcatggctgaataatattccccacgggaatgggccacattttgcttgtgtggatgggctgtgttttgctttgtcctctgatggacatttaggcttcttccacttcttggctgttgtcagtcatgctgtgtacatgggtacaccagtctctggctgctgtcagtcatgctgtgtacatgggcgcacaaatctgtgtgtggacatttgtttcattcctctgaggtagatgcctagaactggagtggcaggatcacagggtcactttgtgagtgaccattttgagggacggttttccaaggtgctttcactaggagttgaagctctgatgaagcagaagacacatcgaatgaggacccagagcaggggtcagaggtgagacccccccaccaggagatgtcctccctggggatggccagacaggctgggtcctgtcggtgcctcggacgagggcaggtggggacaatgacaaacatggaggaggtcagagagccagccccggcccctccacctggctctctgttctgaccttgtagccatcagtgggcatagtgaggtgggtggggctcagacacgcatgtgtggggagcccctccccaggatggtcctggagccctaggatgaaggctcggcccctgccagctacccggagaaccagggcaggaagaaaacatctctgcccctggaggctctcatttgtcccttcatggggacgtggctttgcttccaaggaggtggacaaggctgtgtcagtttggcctccggccctggggacggctgctgctggctgtcctgggtctgcctggaggggagtgagcgaggcggctgtgctgaccacagggagctccatggggtgggactccgggaggtcctcctgctggtgctggtcgcctctggcgttgacatgcaagggtcatttgctggggcaggaggcagacctgggctctcaaatgcacacagcgacctggcagaaagagtgcagcggctcgtaccactcgcccaacgcggtatcgtggaccacgtctgagtgccagagcggagggtggcagacagagctgagggctatttggagagacctaggaggctgggggtgtggggacagggtcctcggggtcagagtccaggaccacaggaccaggagggagccaggaccctgaaagtctaggcgaggccgcatggggcaggggggcccgcaggcttggttagtgggtgccatggtccctgcccatctgtgttctcgccagcgatgcctgagcaatgggtattccagaaccccacgaatactgggctgctgggctcgagtcctgggggagggcgtggtccccatgtcttactgtggaggagatgagggctgcagggatgggcactgtggtccatagctggtctccccaggggtaacaggaggggtgaggctgctggctggagctaggccccgggtgggctaccccagtcctggggggcagccatgagctggggagggtgaatgtggctcaggggcccagagtgctgccagggtccactttgtcccgaaactcctggccttggttccagaggcagctttcctaagatgggccggggggccatgtgctggggttgggggcccacggggctaagagggagactggccttcagggttcacagaggccagcaccagaaggcattgcttcctgcctcatcccatgcccctcgggggtccacagacaggatgaaaagtcgacagagacagaggggtggagccaggcctgctgggggtcaggactctccctgcagtcaggggtggcatcacttcccacctcaccctgtgccccccgggggtccacagacaggacagaggttggtgtgagacagaggcggctttattagaactagagggggtgctgcccagggtggaaccaggcctgctgggggttagttctgcagaacttgggtctgggggagtagctggggtctctcatgcagccagcatctgggaaggacagggggagcatcctggtccctaagacaaagagcctgccccatcttctgagggtgtcaaagccagagagggcagagcttgctggggcagctgggaggtcagcccctggtgggaagggactccggatcacatccagggctgtcagcagctggacttctggccagagcagaggctgtagcaggcagggcgggagcacatggggcggcagaggagggaaacacaggaggccgtgcggcagcagctgggctggcaggaggaggcagaggcaccacaggaggggacgggcacgcagcaggtggacttgcacacagggtggcagaggagggacacggaggaggaggatctgcagcaggaggcggtgcagcaagccggctggcagctagactgctggcagcatgatgtggaagccccagagcagacgggcacacagcaggcgtgctggcagggggaggaggtgcagcaagctggctggcagctagactgctggcagcatgaagaggaatcctcagagcaggtgggcacacagcacacaggcacgcagcagacgggcacgcagcaggcctgctggcagggggaggaggtgcagcaagttggctggcagctagactgctggcagcatgagggtgtgcaggagctggtgcagcctgattggcaggggctgggctcacagaccgcctggcagcaggggctggacacacagctcacacagctagactgctggcagcacgaagaggaaatcccagagcagacaggcttgcagcagacgggcacacagcaggcctgctggcagggggaggaggtgcagcaagctgactggcagctagactgctggcagcatgaagaatccccacagcagacggacacacagcacacaggcttgcagcagacagtcttgcagcagacgggcacgcagcaggcctgctggcagggggaggaggcacagcaagccagctggcagctagactgctggcagcacgagggcgtgcaggagctggtgcagcctgattggcaggggctgggctcacaggtcactgggcagcaggggctggacacacggctcactggggtgcagaccaggctcaggcagggggccggggcgcagcaggggggctcacagcagctctctgggcagtcgtccacctgccaggagtcggagcaagagtcacaggaaccaggaaggcagacgcggctgccgtagctcaggtcgctggagcagacggacatggtggacgcggccatgctggggttgaactggtggagggtgagggagtgagcctgtgaggtgctgaggctctcgggcttttattccacctggccttgttgtccccgggcccacagcttccccttccgtgttgccgagagctggagtctgccgggattaggggtgtttgttcgcccgtgatgtgggccagctcataaatctcccatcacatctgggctgtgtcccatcccatgtggatccctggcggcaggaattgggcggggcctggtcccagctgggttcggggagctgggagagccacaggtcgcggcatcgtccacccctggccccagcagccccgggacacagagtccctctgcaggaagccggcctcaggaagtgtccttgtggtgaaaacccctcatccagcgtggtccttcccccatcaccggacacaggactgtggccatcttctgagggacaacctggggcccatgagccttcattgacctgccctgggccatggcatggtgggggtggggggcagctgtaactgtgcccagacctcttggctttgagctctggacgacttctcatccccacagcctcttcacctccggccctgtttcgtgtccacctcgtctttgtgttttggaggcagcaggacctgtgtgttccagggcaaggacggtgggcttggcccctccctgcttggacagcatgacagccttctgggctgtggttttgggttctgaacctgcagagtaaccgtgctgagcagcgggcggtcagcagccctcgtccccgcctggggtggctcctctgtgtgctctgcttctccgaggctgcccgtcagcccccacccagcctcctgctgggcccatttcccagccctgtcttccaagccctgtgccaggcctcttagtgtcaccaccttaaaattaagggacatctgtccaaagaacccgcacagaagacacaaaatgggtccatgagaagttgatctcactgcaaacccattgccagtgtaaacgaaacataaaatcctaagcccctcaactgactaaatggatcccatcttgcccacggggacccccgaaaaactgcgttcctggccatgacaggaagggaggtcagacacgcctcgttacaccccctccctttagggtttcgacacaaccactacccagcactaaagttaaaatagagaccgtaagacccacagagcagactctggcaataagatatcaaattacaaacaggacctcaggccgcgccaggcaagggacaagccgcgtgccctacactgagaggacggactctgctctcacgccacagctgctgtttttctacagtggctaaacacgcactggccccgcgatgaggatgagcaaggttcaaacgactgcagctcatccaccagcagatgccaactgaccacgttccacagccatgaccacagctctgactgggcaggagactgacttcaggaacctcctcctgataagggacccccaaccatggactggctccagccggtttacagaggctgtgcactggagtgcctttgtgtcctgagaagacttctgaggtttagggcctcattgcgacccattgacatgataagactccaccctgtaagaagtacatttcaagtggtccgtattcagaaaacaggccctggcaagtccaggcagctcccttgcagatgtgacaagccacacagtacagacatctgggaagagtgataagactcacagaagtcagaggggaggaagaaaaagtgacggatggctaacacataaaaggaaagaaacttttgccattgagaaatcaaatgtaaagtggggaaggggacaagatgtaaccttataaggggataatgaaacttaggtgacgtccaggaagcctgtgaccccatagtactcaggctgcgaggaactgggcgagggacctgcacactaggggataaattgcttgttgaaagtgtgctgggtgtgcccgcccatcagacaccagatcttgcaagaccgacattaaagtctcactttcactgttcttcatgcctctaagtccattctttggatttggacgggtcagtgtgtttctcacaaccgcagagtgaaaacaggtcgtatgttacatgcatgtttgttcagttcctccttcgtgaatattcactattcctccataacctattgcacatgtgtattcagccaacctggtcagcgtggagctcctgccccagcccctcctcctggctctcgtcttggccagaggctgtgcttcccggcctgcaggatggctttcttgcaggctgtgcccctttagaagaaacaaagtctcctctttttttccaaacttacggatctgtgattttttttttttttttttgagatgcagtctcactctgttgcccaggctggagtgcagtggtacgatctcagctcaccgcagcctccacctcctggttcaagcaattctcctgcctcagcctcccgagtagctgggattacaggcataagccaccatgcctggctaatttttgtatttttagtagagacagggtttcaccatgttgaccaggctggtctcaaactcttgacctcaagtgatccacctaccttggcctcccaaacatgctaggattacaggcctgagccattgcacctggccagatggtgatttttttaaatgaacacaagcagtcacccaattctcttctcaggaagcagctactttcacccatttattctctttctctctgtatctctccatctctctctgtctctgtctgtctgcctcttccgtatatgcacacacacagcccattctcattattcccagaggctctgttctatacagtctccaccagcaccgaataaccaaatactgaaccactgctcctacaggaagcacagggttatggtctcatgagcctctgatcacaacattcccatcacctaatcaatgcatagacatgtcttacgaatgcttctgtctgaagacaccttactgaatctatatagttgatttatcaacactgagccccagccaacagccctacagagcctgaatgaagttggttgaacacatgtgttttctctgtaagacgtgctggagccttctgagctccggacacccagcagcacagcagcactgcactggggcactttaaacaacaagatcagagcatcgtggaggaacgtgcggcactgaggagaacataacaaggacacctgtttaccatatgcgagctgagacaggaaagcaaaacatcacctcattctattatgtgtatgtgtaaacatatatgcacatacacatacatacatataatgcctctgtacacataaatttttaaaatgcaaattatgtcatactctacccactatgtttctgtaaacatggagctcctttcctgtgaatacataatgatctctgtcttgtttacagctgcatagaattccatgtggtctgtgtgttcattttctattgctgtggaacaaagtaccacaagcttagtggcttcaaataacacacatttatcatctcggtttctgtgggtcaggagtccaggcacagttaaattggggtctctgtagggctgtattggagtgtctcatgggaaggttcaattggagaaggatccacttccaagctcatgtgattgttggcagaactcagttccttgtagcttcttggactaagtgcctcagtttgtcaccagctgtcaactggaggctgccatcatctctttccatgcggcctcaacgggcagctcgcaatgtgctggctttttcacagctagccagggagacagagtcctcccgagacgagcattatgaccttatgtaatgggatcatgcacatcccatcaccctctctgtggctccttgtgtctatacacgtgtcacagtcccaaccacactcaaggagtgtggggcacacagccagtgaccactaggaggtgagggacatggggccaccctagagtctgtctcccgctgtctggacaatgtcatggctgtgatacctttgcacataccttgtatccacccaggagtatctacaggatgcttgcttagtgattcaggcttaaaggcatgaggttttgaattgtgatgtgtagcagcaaactgcctgccaaagccgtggagcaacctcagcccagcagcaagtcatctgggtagtctgcccacaccctcgccaacccatgttgggaacatcaatggttttcattttttccaatataaaaaatgatatcatatggccattaaatttgttttatctcattttaaatggggctgagcacgttttctcatttaagaaccatgtatatttctttcaattgtctctgtatcctttgctcactttctgttatgtttctgttattgatcttaataactcgtgggagctctttggatattaagcaaattagccctttctctgatatacagataggaaatgtgtttcccatattgttgtcttttgacttggtttataatgttttctctcctgcaatttaaaaatttttacataattagttttatcggttttttaaatggcttcggtgttttactcaaaacttagaatagccctttccactctgagatgatttttctttcccttcctatcattattgacaggtgtattaacatcccccactatgattttcccttttctctatttctacttttagctctgccagttaaaaaaattaaaaaacagttttttattttaattttttaattttatattttaagctatgtaattagatacatgcagatttagaattgttacatcttcctggtaggttgactcttttagctttatacatttctttcttcatctctattgctctaaaatctactttttctgatattcataagtcacactagcattttagttagtgtttgtgtggtgtattttcttccatcttgttactttcaagctttctgtgctctttttctttttctttctttcttttcttttttttttttttgatggagtctcactcttgtcgcccaggctggagggcagtggtgcgatctcggctcactgcaacttccacctcctgggttcaagcgattctcctgcctcagcctcccaagtagctgagattacaggtgcccaccaccatgcccggctaattttgtatttttagtagagacagggctttaccacgttggccaggctggtctcaaactcctgacctcaggtgatctgcctgccccagcctcccacagtgctgggattacaggtgcgagccacagcacatggcctctatgctcttgtattcaggctctgtatcttgtaagcagcatgtagttaggttttctactttttattcagaccaacaatatattttaattggaatatctgatactttattgactgatgatttagtttatatctatctgccatctgactgtacaatttctatttgtcccaattttttaacgtttcttttaaaaatcacttcctgtctattttggattaatcaagtattttttattatttattttccctcttctgttctattcattattcgtgagataaggcaaggcttctcttcaaacaggctgctcaaccttttgttctttaattcctagtacccccgccccctctctttcttctccttttcttctttctgactttactacatgcccaggcatgccgcaacatcactagcattatcagcaccagctcgcattccgttctgtatttaggaaaagactggctctctagtttcccgtagatgaccccttcctcctctcccgtctctcccattatgcatccattttatctaagaaagtttaaatgtttagccaatcgggtctagtttaaattgtgcggcgcaatcccagccaatggggaaaggacacaggggcaggatcacgttaggaataaaaacttctactctcctttgttctgtgtgctctcgtggcaaccagccatatgggagacaccctcctgcacagacatacatttgctttgctgagaaatcctttgtctcagtgctcgtttttccttacgactctgagccttatttctaacattattgattatacattgattatacatagtttttactatctcttccgtggtcactttagagattatagcacacattcttagattattcaagtgtaacatatgtcagcacttccgccgcttccaaaacaatgctgaaaccttagaaaactttcactccatttatccttctcaccttttattgttaatgtcatcatgcattacttttctacttctagtttagaccccacaagagattataaatataataatattaccctttcagatcctcctggttccttcctgcatttttatccttccgtcatcctgcctaaaaaaatcccctttcatagttactgtagagtaggtctgctcgtgttcagtttgctcagttgttatccagaattgttttgtttcatatttcacctttgaacaatgttcttcctggtctagaattctaggtttgcagtgattttctttcagctctttaaagatgtcattctattacctttagtttcttcaacagctcttttaggagagctttaaaggaatcatttttaaaacattttgttcagcttttcaagttgttctcagcaggagtatatgtctgacatagctactttgtcccatatggaagcagaggcccccattttctctctctctctctctctctctctctctctctctctccttccatcccataggaccagatcctgtacctctggagggaccaggccatgctcaaatttatattatttttatagttcaaaatatacagaaagacaattcatcccaccgtgtaactgaatttctagccctctgaggccttttgtacttttcctaaatcccctaggagttaagaggcctggactgggaaacacagatagagacacaggacaccctgagcctctgagacttgcctgggcatcaaaccccaccagaagggcccctggagccctctcccctgggtaggggccacttctcagggccgcatgcatgctgggctatggctggtcatcactgacatcaccaggcaccaagcagcccacctccctccctggtggggtccacagtcagggttactaccccttcactttcacattctcagcacctggtgcaatttccagcatgtgggaggactcactgcatcatgaataaatgaatgcttgagaagtaaaagtatcggatacaattggaaacatttagcagaaacaaccaaaaagatgtggtggccaattggatattatttgcagaagaaatggagacttagatcagatgtctagctggggtgaccaaggacttagctggcaatcaagaaaacacactgcaagcgaaagcagtgcttgctgcttttcacacggcagtgctgttgagagtggctgtgctttttgcggaggaggtgttctgggttagacttacaggtttgcagtgcttgggataaaaccaaatggaaatgggggccccaaacagggatctggggcctccctaagtgcccagatggaagagggggtgcacggccccccaggaactactgtgaacctgacgggaaatggctcacaccactgtccaccctttcccgtttgccacttgctctaaagcccttggggggactttatgcaccagagagagtgtggggagtcacttctaggaatgttccaccctcatgccatcattgacaggggcttctctagcctggcattccagaagccacagccacccagacaagcagagtcccctggcgatggcccacaggcgctgggattaggatggatggatctctcctgcagccagcacaggcccctgggacactctatttgcagacattacaccctgtctacttcaatattatgctctggagccaaaggtaggtgagggtgcgtcaacggaaccaaatatagactcaggactttacaaactgaacggcatctcataggactaaacatgaaactcgcactaataagcgttctctaggttttaaacacaaacaaggaaggggcaggagttgttgacactccagctgggacaacagaccagggagacatataaaagccaacatccctgagcacctaacacacggactcactcactcattcactcactcacccactcactcccatctcctccagttcaatccccagcatggctgcgtccactatgtctgtctgctccagcgacctgagctacggcagccgcgtctgccttcctggttcctgtgactcttgctccgactcctggcaggtggacgactgcccagagagctgctgcgagcccccctgctgcgccccggccccctgcctgagcctggtctgcaccccagtgagctatgtgtccagcccctgctgccgagtgacctgtgagcccagcccctgccaatcaggctgcaccagctcctgcacgccctcgtgctgccagcagtctagctgccagctggcttgctgtgcctcctccccctgccagcaggcctgctgcgtgcccgtctgctgcaagactgtctgctgcaagcctgtgtactgtgtgcctgtctgcagtggggattcttcatgctgccagcagtctagctgccagtcagcttgctgcacctcctccccctgccagcaggcctgctgtgtgcccatctgctgcaagcctgtctgctctgggatttcctcttcgtgctgccagcagtctagctgtgtgagctgtgtgtccagtccctgctgccaggcggtctgtgagcccagcccctgccaatcaggctgcatcagctcctgcacgccctcgtgctgccagcagtctagctgcaagccggcttgctgcacctcctccccttgccagcaggcctgctgtgtgcctgtctgctgcaagcccgtctgctgtgtgcccacctgctctgatgattccggttcatgctgccagccagcttgctgcacctcctcccaaagccagcagggctgctgcgtgcccgtctgctgtaagcctgtgtgctgtgtgcccgtctgctctggggcttccacttcatgctgccagcagtctagctgccagccggcttgctgcaccacctcctgctgcagaccctcctcctccgtgtccctcctctgccgccccgtgtgcaggcccgcctgctgcgtgcccgtcccctcctgctgcgcccccacctcctcctgccaggccagctgctgccgcccagcctcctgtgtgtctctcctttgccgccccgcatgctcccgcccggcctgctgtggccccacctcaacccagaagtccagctgctgagtgatctccttaagatcatccaaagcctgagtgctcactgccacctgcacccctggattctttacccttgacggctctccacatcccgctcctaagccctgcagtggacgtcagtggtcagctggccatccagtgtgcgcttctcctcctagaagcagctcagctgtttctccaagtcttgactttcccccaattacccagccctgcttccccagcaacaggtgggcagtgaccccagcaaggccagcgggtgctcccaggccatagcccggtgtggggagaaatgagggtagacaggtaccaactgggtttctcgtcactgtcccagctcagtggcgagccctgctcctcccctgctgtgggcctgggcctctttctctgtcttccctgaccacgggagcaggtcagacccttctaataaactcctttcctaaaaagtacaactggaattcattcttgttgttcacaaccaaagacccctgcctgatgccccccacccgcgggtggtcctgggctgctcccacgccacgaggtccctgtccttcccaggcgtcctggcagccctgcaccagcctcaccacacggatgtccgaggggtaggcaggactgagggatgggagaggtgagggatccaacagcagcgcctgccctgggtggggctgctttggggcctccccagaaactgggttgtgtccagcccctggctccagaaaggaaaccccatggccgtgtgcagaatgggtccacacggtgggcggggacggccatcctgaggcccgctggccgggctggcccttggctggcgtctgggaactgggatttccgaggggctccccccggccccgcctcactgggcctgagctgtttgtaccatgtggtttaggccgaacacccacatccctgctgggagtctggaattctggcgtagcccaggcagaagctgctcacgtgaccagtccccgggtacatcaccgggcagggcatccccaacatcgcacacgcagcgtcccagctgcttgcagaggagtgaggcgcgtcctgcgtgacccccaccccaggagaggcctccaaagctgagcctggtgcccctggactcggccccaggaacctttcccttggttgattttgctcagtgtcctccctgtgggaaatcacagctgtgaataccacaacctgtgtggcctgtgtcctcctggagaatcgccgtcttggggaccctgacacagaccccaagctgcccttcccaagcaatgacaatgctgtcctaggacagtgctgggtgcatttctggtagtgcttcctttgactcctgctccagagggggtggagacagagaaggaggctgggtgaggccaggccatcgtaggtttcatgaggagcagagccgacctgcgcctgcaacgagctgtccctcccctgtggtggccacagaggctgtggcctgaaactctggcgtggggctggagcaccagctggcaaggaataagcccccacatgtcccacctggcactcctctgcccctaccccggcccctgtgcagaagaaatgagccaggcttctctctggcaccagggctacaccctaagtcagcatcccaggctttgcgtcactggctcccctctggttctccaggaggcaccaaggggaccctgtggtgagtcccccaactacaggcacctgaatcccacagacggcaagatggaggggccttgctcagagaagcacgtcctcctctgcggatcccagactcggctcctcccctaggcatggccccagcaagcatccaggcatgtgagcctctggggaaacacgccccccacgccccgggtgtgaacttcaggggaggtgtgctgtggggcagaaacatcaagttcccttccaagggcaacaggtggaacttcagaacctcctgcaagaggaagggcgtgccagggtggctgagcagagagaagcagcctcctccaaggggccattctcagccgcaccacagaagctgacggtggctgaaactgccctttgtcacctggacattcaccatttgccctggtcaacaatgcctaccgccatccctggtgaaagaaccaatatctcacaaaaaatgcaaaaggcacaaatcattagagaaaatactgacaatcttgaatgcagcaaaatgcacacaaaagcataagcacacaatcaaagtttccaccaatcccatcccagagaagccacctgtggggcatcacggggagactgcgggctcactgtctccctcctgggcacgtgggctggcaggttccagccacctgcagttagttagggccacatgatgagtttctattggttaaacgtgcatggagagatgtctgccacttccacgccacaggttgtgggagccctgctgcctctcttccttgccgggctatcttggaggctcacgtgccagagagtgggtccacaaggtaggggcgcagcatgcttggatggcaatgtgaggagtggggaaggccttgtgggcttaagccattgacatgttgacttctgttggtttctgaaccagcattgatgaccttcacccacagtatgtaacaaaagattcaaattcagaatttataaagaaaacataaaaagaaacgaataaaagagatggaaatacgcaattataggataagatgtccaatggccaaaaatcacaggataagatagccaatctcacctaccatcgagacaccatgcacaaaaattaactaggggtgaaccctagacttacatgtcaaagataagataatgagatctctatataagatcacatcatcagcagagacagtctcacttctttcttttctattcagtaccttttatttctttttcttgcctaattgctctggctagaacttccagcaccacgttaaatagaagtgacaagagtgggcatccttgccttgtttttgatcttagagaaagagctttcagcttttcaccactgagtatggcatcagctgtgggcttgttgcatatggcctttatcgtgatgaggtgcgtctcttctatgtctattttcttgagagttttaatcatgaatgaatgctgaatttgttcaaatggtcttttgcatctattggggtgatcatgtgttttttgtctctaatgttagtgtgatgtatcacatttattgatttatatatgttgaaccattcttgcatccctgggataaatcccactggatcatagtgaaggatctttttaatgtgctgttgaattcagtttgctagtctttttttgaggatttttgcatctatattcgtcaaggacgttggcctgtagttttcttttcttgtaaagactctacctgttagtcttcaaactattaggactgataaacaaatttaataaagttgcaagttaaaaaatcaacatacaaaaattaatagcatttctatatactaacaatgaacaatgatccaaaaaagagattaagaaaacaataccatttacaatagcatgtagaagagtttagaaagatatttaaccaaggaggtgaaagatctgtacactgaaaactacaaaacattgatgaaagaagttgaagacacaaataaatggaacaatgtcccatattcacggattacaagaattaatattgttaaaatgtccatactacctaaagctatctacagattcaatgcaatctctatcaatttcaatatcatttttacaaatacatagaaaagaacaatcccaaaattcatatgaaaccataaaagactctgaatagccaacacagttttgagtaggaagaacaaagctggaggcatcacactccctaatttcaaaatactttaaagctattgtaatccaaacaccatgggactgacataaaaataaacatatcaaccaatggaatgggatagaaatcccagaaacaaacccaagtgtttgttgtcaatttatttctgacaaaggtgccaagaacaaatgatgggaaaaggacagactcttcaataatcagtgttgggaaaactcaatatccatgtgcagaaaactaaaattgaaccctcatcttacatcatatgcaaaaatcaactcaaaatgcatggaagacctcggcataagacctgaaatgtgatactgctagaagaaagcatagtggaaaatctccattacattggtccaggcaattattccttgaataggaccccaaaagcacacctaacaaaataaaacatagacaaatgagattgcatcaaacgaaaaagctgtacagccaaggagacaatcaacaggatgaagaaacaacccatggattgggaaaaaatatctgcaaaccatatatttgatgagggactactactcacaataaggaactcaaacaactcagtagcaagaaaataaataacccaatctaaaaatggacaaacagcctggcaacagagcaagaccctggctcaaaaaaaaaaaaaaaaaaaactacataaataaataaaaatgggcaaaagacctaaacagacatttctcaaaagaagccatttaaatggacagcaggtatatttttaaatgctcaacatcactagtcatcaggaaaatgcacattgaagatgcaatgagacatcacctcacacttgtcagaatggttcttatcaaaaagatgaaagcgaacaagtgttagggaggatgtagaaaagagggagtcttgtacattgttggtgggaatctaaattagtacaaccactacgggaaacagtatagcggttcctcaaaaaactaaaaatagaacttgcctatgatccacaaatcccacttctggttttatatctaaaataactgaaatcattcttttggggagaggtctgcactcctatgttcatttcagtcttattcacaatagcctaggtatggaatcgatctcagttcatcaattgatgaatggataaagaaagtgtggcatatatacacaatggaatactattcggccatgaaaaggagaaaaattctgtcatttgtgacaacttgaatggacctggaggacattatgctaagcgaaataagccaggcacagaaagacaaatggcatgatttgtgtctagaatctaaaactgtcaaacttagaaacagagagcagaaaggtggttaccagaggccgggggctgccagaggagaggaatggggaagggagatgttgatcaaaggaaacaacctttccatcacactggaggaaaaagctttagtgacctactgcattgcatggtgacacataaaaataatgtgttgcatacttcaaaactggtaaaagaatatacttttaatttaccagaaaaatggtaagttggtgagatgatggttatgttaagtaacttgatttcatcttttttgttttgttttgttttttagacacagtcttgctctgttgccagactggagtgcagtggcacaatagctcactgcaacctccgcctcccgggttcaagcaattcttgtgcctcagcctcccaagtagctgggactacaggtgcgcgccactacacccaactaatttttgtatttttagtaaagacagggtttcaccatgttggccaggatggtcttgatctcctgacctcatcatccacctgccttggcctcccaaagtgctgggattacagggcttgatttaatctttctacaatgcatgcacaggtcaaaacgtcacattatagatcaaaacatcacattatacctagtaaatacacacaattattatttgtcagtttaaaaattagtaaatgaacaatgaatgaaataaaaataatgaagctctagaagcacatataggggaatgtcttcacgacgttgtggtaggcaaagacttcgggaacggggtaaaaatgccacacataagagagtaaattagtaaatcggattttactacaattaagagcgtctcttcatcaaatgatactattaataccacacatccataaacatgactcagattgaaatagatgaccaataccgagtgtcagcaaatgtgtgcaggaaatggaactctccaacatttgctggggtgggaatgtgaaatggaaaaatccctctgcaaaacagtttggcagtgtcataaacatgacacacacacccccttcacatgccccacacactccacctcctgtgtgtttacccaagagaagtgaaatcatatcacaaagacttgctcacaaatgtttaaagatgcttttgccacacaagtcatgtgtccatcgacacatgggtcaattgtactatagaatttgatttacatgaaattccaggaaagacaaacctatttgagacacagaggagatcagtcgtttcctggggcagagtcaggaggggtggggattgatcatgaaaagtacacctgggaactcggagatgatggaaaatccagatcttgcttgtggtagtggttacatgggtgtatattttctcaaaactcatgaaaaggtaactttaaataggtaccttttacagcatgtaatcatacttcaataaagctgactttttaaaaacttcatttttaaaccccagacttggatgggttatttgcaattcccatactcagtggtacactaaagccagcatgccctggctcatgagagctgacatgcacccctctcttcccatctctgtgttaagtgacattgtcttggtagcttggatttagctgggttgggagcattcacacgtggacgttggcaaatgcaaccaattgggacttttgtttttgttttcgttacaaaaacaaaagccagttattgaacgttcactgacacactgcatgtatacaactcatattcagaatacataataaatttctgcaaatcaataagaaacacaagtagccatattttagaaagcaagcaaatgtcttgaacaggcacctcacaagaaaagatatccaaggttcaatgagtggctttactcatccgggatatgcacattagtgcaacagtgcaatattcctaaacactttccaaaataaacaaattttaaaagactgatcaacctcattttgtaaagatacagaataaatggaattataaaatcaactagtgaggatgtaaatttctttagaaagttgttggtatatgctaagccaacatatgcctatctatgaccaagcaattccacttttgggagcacaatgaagagaaattagtaaaaatatcagtgaaaaagtttacaagaatttttctaggagcactattaacagcagcccaaatctggaaacaatctaaatctctaacactgtgaaagagaatggacaaataacacgttgtagaatttaatgcaatggggcagcaaaaaaagagtgaagtactgatgcatgcagcaacatggtgcttctcacagacattgtgctgaacaaattgaaccataaaacaaaagagttccatagaacacgcaaagctaaccaatgaggagagaaggtagaacagcaactaatacttagggaggagggactaacaaagagatagcataagggatcatttaggactctggtaatgttccacatcttccccaaaatagtctaaggggaaatatttccacccagaaattatatccagctaagctatcaatcaaatggaagagcagaataaaggcatttttagtcatgctatggctcaaaaatatatcttccttgtacccattttcagaaagttactggaggatgtgctccaccaaaacaaggatataaatccagaaagaaaaagacaaggcatccaggaagtaatggatccaacatcagagagagatgaatgaaaatccaaagacaagagtgaagggagatcccaggaaacctgtgtaccaggctgagggagcagccaatagagactggtccacacataagacagctctgagagagatgtttccaaaaaataaatgaagctaatagattgttatatttgaacctcttgagtggagcatggggatgaatgagtcagagtttggggaggagcaattgttaactccaagaggggaaaaacataaacaaaaacaaaacatgtacagataaggaaatttaatctggttccactattcagacttggctatgaacaatatttactttattataatatacattctgaacactgatgtaaccaaatattgatattttacttcctttgccttctgaggatgggaagggggaacttttcacgggcctggtgataaactagagaaagtactttcctccacaataggaaatcagatcatacctgaaattgaaaatgcaagaaataacagagcatgtatattgtttaataattctgagacaaacaggagaactaagaagagcatctgggatgggccttgggagggatgcatgccagagagaggggggtgttaaaggcattcagttttataatgaaagcagagcataaaagtttgaaaaatttgtagcctgactatgcaatagaaaagaaaaacccattttctagggagaaattcaagccggatgcagaaatttgcataagtagcaaggagcctattgttaatccccaagaccatggggaaaatatctccaggccatgtcagagaccttcatggcagcccctcccatcagaggcctggaggcctgggaggaaaaagtggtttcgtgggtccagggtccccatgctgtatgcagcctgggtgaaaggagccaatgtacagctcagactgtggcttcagagggtggaagccccaagccttggcagcttccatgttgcgttgagcctgcaggtgcacagaagtcaagaattgaagtttgggaacctccgcctagatttcagaagatatatggaaacgcatggatgcccaggcagaagtttgctgcaggggtggggccctcatggagaacctctgctacggcagtgcagaagggaaatgtagggccagggcccccacacagagtccctactggggcactgcctagtggagctgtgataagagggccaccatcctccagaccccagaatggtagatctattgacaccttgcaccatgtgcctggaaaagctgctgacactcaacaccagcccatgaaagcagccaggagggaggctgtaccctgcaaagccacaggggtggagctgtccgagaccatgggaacccacctcttgcatcattatgacctggatgtgagacctggagtcaaacgagatcattttggagctttaaaatttgactcccctgctggattttggacttgcatgggccctgtaaaatccctttgttttggccaatttctgccatttggaatggctgtatttacccaatacctgtacccctattttatctaggaagaaactagcttgtttttgattttacaggctcataggtggaagagacttgtcttgtctcagatgaaactttggactgtggacttttgggttaatgctgaaatgagttaagactttgggggactgttgggaaggcatgactggttttgaaatgtgaagacataagatttggaagggccagggacagaatgatatggtttggctgtgtccttacccaaatctcgacttgaatttcatctcccagcattcctacatgttgtgggaggaacccagggggagataattgaatcatgggggccggtcttttcctgtgctattctagtggtagtgaataagtctcacaagatctgatgggtttatcaggggcttctgcttttgcttcttcctcattttctcttgctgtcaccatgtaagaagtgcctgtcagctcccaccaagattctgcggcctccccagccatgtggaactgtaagtccaattaaagccctttttcctctcagtcttgggtatgtctctatcagcagtgtgaaaatggactaatacaggggcatcgcaccatagtttgcagatggaacaggtaggggtggcagggtggggagccagggggcattcctagccgagacacccattgttcaatggagcagaactctgggacaggtggagaacatctgctggtaaaaaaacaccccacccctggtaccaaataccccaatagcaaagacatacaggcaaagacaggaggaaagtggggctgggttttccagacttgccaactcacgatctgttcaactcccagctccaccagcagacacgcagcatcactgtgtgtggttgcagggcacagacacctgcaagtggtcagcatcacccaaccacatgcagcagtcctgggaccacagtaacatcccacagcaagtaaactaattagggttgcctggaggcaaagtctcagccacaacaaggaaagggaaggcttgtgagactcctgtgaggaaaatacccagggagggtataaaacctcagcagccagggcacacaaacccacacacctcacaccagcactcacaccacccagtccagcacccaccatggctgacgcctgctgcaccaggacgtatgtgattgctgcatccaccatgtctgtctgctccagtgacgtgggccatgtcagccgagtctcctcccccagcacctgcactggctcctcctggcaggtggacaattgccaggaaagctgctgcgagccccgctcctgtgcctccagctgctgtacccctagctgctgtgccccagccccctgcctggccctggtctgtgccccagtgagctgtgagcccagcccctgccaatcaggctgcaccgactcctgcacaccttcatgctgccagcagtctagctgccagccggcttgctgcacctcctccccctgccaacaggcctgctgtgtgcctgtgtgctgcaagtccaactgctgcaagcccgtgtgctgcgtgtccatctgctctggagcttcctccccatgctgccagcagtctagctgccagtcagcttgctgcaccttctccccatgccaacaggcctgctgtgtgcccatctgctgcaagcccatctgctgtgtgcctgtctgctctggggcttcctctctgtgctgccagaagtctagctgccagccggcttgctgcaccacctcctgctgcagaccctcctcctccgtgtccctcctctgccgccctgtgtgccggcctgcctgctgtgtgcctgtcccctcctgttgtgtccctgcctcctcctgccagcccagctgctgccacccggcctcctgcctgtccttcctctgccgccccgcgtgctcccgcctggcctgctgaggcctctgctcaggccaggagtccagctgctgatgggcacgtcccccagggccagccggctccggtcctgtcctgggttaagtggctgcccctacctgggatggggtctccatgtctcccctgtgctgaggtgacctctccctccttactcccaggagcctccatcctcactgctccccagctcttgccttccagcaggtgcccacctgcctgctgggtcccctgtcctccctcccagcttctctgctctgggtcacttggcctcgacttgaacctctcagcacctcctcctactccccaataaactctccttggtcacctgattctcttttcctgttgttctcctgggaggacacacggttttgagctgacattggtctcctccagccatgaccgtttctaggagtgagttacttaacctagaagtcacaagggacagtggcctaactcctccagggggtcaccaggtgggactcacggtcactcccaggaaggctcagtcccggctcagcccctgtgaccgggtcttcctgagcctggtcattcgctgtagtgccctgggctgtggggctctccaggccccaggaccaacccacccactgtcccacctgggagagcccaccctacagagtcacctgccgggaagctggcctgggttccgggcactgcagcctccaggcctggtcaccctccctgtgtgccgcccgcccgagggttctgctcgcttagcagcaatgcgaggggagagggaggggctgctgcacctgcgcaggagacaagggactcgatgggaacaaaagcatcatggactgggtggagggacacacaggattcccccaggatcttgatggagacaaaagcatcatggggtgggtggagggatgggatggggggatgcttgctgccgactgggacattccccaaggcccgccgcccctgcccctgaaatgtgtgtccttcacgtcgtttaggtgcgcgacttatgattttcaaggcttgtccctaatctctcccaggccaggcctggccaggttcttcaaggccctgtggctctgccgccccgaccggggtcaggggtccacacggctccagctcaggcctctcctcctcccaccctgcccagcggcatagggactgcccctgctctgctgggcttgcccatcctgccgtaggtccctcacctgatgacgccatgagctcctgctctggtgtctgtcggggtgtctggtgtctgtctctggggacctcagctcccccatcttgctctgtccacagcatcaagccccccgcccactgctttgaccattcacgatctgtgacgccagcgtcactctccccctctacacccattcaagcacagcacacggtctgagctggggatggccgtccccactgacgtcaggcagccctaagttggcctgtgccgtgcactttgcatcaccagcatggggacagcgcccagagacacgaccagtagtcactgtggctggagggagcccggctccacaagaggcaccgtccccagggggctgtcagggtgggctcccttgcagacagggagtccaagaaacctctgccattcgtgagtgaccaatcccagggcccaggcgagggtggaacagagtccctggtctgcccttctctcctcccagttccaggctcggttcctggcagggccgtgtggccgggctccggaacgttcctactggcccctctcccctctgacggggcctgcctgggggtgttgggctggggggaccatcaccagcagacagatgaatgcatgacagacttctccaatgagacacgcagagcaagagttcaagaagactctgatgtgcttgactccataagcagacagtaacctctctatgccacaagacgacagcagaaaaccagtgaaaaaggaagccacggtgtgtgagaagacactcgaccgagaagatttcaatgagacaaaagcataaactcccaggaggaaataggcatggacaggctactcccacccagcggcccaaatggccttggaacatgagacatcggcacccctggaaggcaggcacctgccgacaggaaccccaggcacctcaccccacctgtcctggaagaaaaagctggacacacccatcgctcaccggacgtggcaggcaggagctccagctggctgtggaaatgggggattggcaccactgctttgggaagaggcggggccgtatcctaccatgtgagaggccctcctggactccgccatgggcagtgctgaaaaatctccggcgcatgtacgtaagcggcactgtttgttaccatgaaaaattagaaacaacctaaatatccatccacgagggaatggaggcgaatggagccagcgccgcaccacggggaggccctgcacgagggccgtgcgctcacccgacccgcacacacgcaggagcgcgagtgcccaggctgcggaagagagtccaggccgcacaggtgccaagcgaggcagcgctctctggcctggggacacgctgtagcagtttgtgtaaataagtggatgggatcccacctctcagcggattttccagagaaatagctgggggattaaagacatttttaccatggaattaatgacagcggggatctcaccacccagcttaaccagatgtcattaattccataaccaaaggttttttttttttttttaaatttattctgtttttttggaaccatttgaaattcagtgctgtagccacatggcggcacctcccccgggtctctctgcaggtgcctcctgggagtgagggctttctcccgcctgcccacagcgagtgcagctgaagatggccaacttctatatatatatagttatcaaaagaagcagaacatcatgcaacagtcgtatccaaatttcccaaaaagctccccaaattggaatcagataggtctgtgcactgccctggtgaccctgaggttctcgtctcatttaacccaggagcgtcctcccgggaccagaccctgagcattctggacactgctgggaggtcttcatcaaggaaaacacgcccatgagacaactacttcaggcggggccgccagggacgccaaagccactgtcaggaggtgcttgagcaacagggtgtccccacagtgccacatcccccagcggaggccacacagagaagaccaccccatcggcacagacagaggtcggcagcacctgggcagagtgcagcgtgtcggcgggcacctcccagcggggcttcctatgtgtcactgcacacatgcttaggctctcagcccgaggccacatctgttcgatgcaggcaaaggcagctgccccagatccctgccagggtcacctctgctctaacaacatgacagcagggaacaaaccccaggggaggtggacgctctcacggtgcccttttgtctctaaagcggggagagatcttacaattcttctttttctctgccaggatgttgccttgggggtgggcacctcccttctccaccccacaccaccttccacacaaccacagacacaaggctggggcactggcccaaatgtcacaggtgtgcagccacagggctcttacctttcacagcctgtcagcccccgaccctggttccccagtccctcaccatgctgcctggccctgcctcctcctcctccctgccaggtgccttccagagcttcacagcctccttctccacctcccacaactccagtccctcttctcagatcagtggggcaagcctggctttgtttacctggaacccgagaccctgccctggtcagcacccaattcgagagctctgctcagcagtgagaatgagacaccgtgacaatgcggctgcgcaccggacacctggctcagcgcaggcagcgcacggacagagtctgcggtgtgaccacaccaagcagccctaaggcagcacgtgcccgcacaagcctcagcctctgctccggtcacgcctgcccacttgggtgtattttttgtctgacttttgcttctggggccgaacaacccagcgaattcaacacagccccaaggctgggctaaaagttcctgggaggaacacgtgccacagcctagacacccaccaggaaaagcaaccaggaaaggagggtgcagtggggaaccctgctagaaaacacacatggggggtctctaaaaccccaagggccccaagcacctcactcactcacccactcactcacctcactcacccactcatgcctcccccagctcacctcctccacacccccagcatggccacgtccaccatgttcatctcctctagcagttgcactgactcctggcaggtggcagaggccccagctgtgctgggaggtgggacatggggggacacttgggctccagctgtcccagcgctcagggagttctactcagggacagcttgggcatcctggcctcctgtgcacgctcacagatgctcaggggcgccctctgctccagccccaggcttgccgctgggatgcagaacagagaacagacacacggcctctggaattccctgtgctgggctgggtgggcggagggccccaatggcagaggaagtccaggacagcgtggggacacatgcagaccagagggtgagagaaacacatggacacacaggtccagttgtagccagatgtggtttcaaacaggattgagcaacagattcctagaaatacaactgcaggcaagggatgctggcaaggtgtggccgtgaccaggttgcctgcaagaggccctgagtctttacttcttaagagctatacaatcacaatgctgggggcacacgttattctttctttgccaatttaataaagaaaaatatcttatggttttcttcagcaagctgcgcagtgttccaaagcgtgaacacgctgcacttgatgtctgcaacaccaggtggatggcactgaatgtctctctagttgttctttattacaaacgacacttctgtgtgtgtttccactatatacctttccacactcagatatgtgtttgcctaaattcctaaaagtggcacttctaagctggagtgttagcagatttcaaattcataaagatatttagaaataccctcaaaaagagtgtccaaactgtgcctgctaagaccgatgacagaggaaatggtggagcggggaactgtaagggcctgtccctccacagaacatcagaaactggcaaaacaaacagatatggttggactttttgtccccatccaaatctcatcttgaactgtcatccccaggtgttgagggagagacctggtgggaagtgattggatcatggagttggtttcccccatgctgttgtagtgatagtgagttctcaccagatctgacagttttataaagcagttttccctgctctcacttgcttctctctcctgccaccatgtgaagaaggtccttgcttccccattgccttccaccatgactgtaagtttcctgaggcctccccagccatgtgaaactgagtcaatcaaagttctttcctttattaattactcagtcttggatagtatctttatagcagtgtgaaaaaggactaatacacaaacaaacaaacactacctggtaaaatcaactttatccaaactctggaaaatggtcaaagctttgcagcaagcaagggaacacataatcaagtaaaagcaacagagcccaataggagaaccttgtggattttaacttccccttgccccatcccccatccccagctgggtgacagtcaggaaggcagcagccggagttcctggtgtggggtgctgctgccagggaagcagagtggaccttgtttgtaaggcagtgcagttgcctgtttcgaccgtctggtggctccctgaaggactaacacacagggcttgccttatttcaccaactcagactatctcaaggtagaggagcagctatatggagggtgtgtgttacaacgtttaaaggtaaatgaacaagtcactgacacctaagtcaaaaattttcagttgggaaaacactggacacccctaaaaagcctgggaggaaaagctaggagatgacatgctttgaggaataagggagttagaaggttccacatatttttagagtccagaaagcccccgtgcatgtctatgatggggcactggctcagaaaagagctgagaagctctcattgctcacctctggctgaacctcaggctctgagcaagcaggaagtgaaggtgcaagcaggaagtgaaggtgcaagcaggaagtgaaggggaaggcagagtcacaaactccccagccgagtgctgaaggcgtggaccaacatacagagcccagctacaaaccctgaagaaaaataagtttttgattccaggggtttaaggaactctctgtcaaattactatctcagcactaagctaatagaacagtgagcacacatggtgaagaaactatttttaaaaactgacagaaacaaacaaaaacaaccacaatccacaacaatcagcaacagcaaactgcgcagagggaggagagcctgatacccagaaatatccctttgtaattgtcactgtgcagttttcaccagaggcatgtgccatgcaaagcagcaagaaatataagctactcatgaggaggaaaagcaattaatggaaaatcttcctgaggaagcccagaattggacttattagacaaagcctttcaatcaactctcttaaacatgtttaaaaaactaaatacaatcacagacaatgaattaagataaaccaggagaatgatacctcaccaaatagagaatatcaataaagagataggaggaaatttaaaaagaaattaaatagaagttctggaattggaaagtacagtcactgaaataaataactcatgatatggtttcaacagcagattttagcagctataagaattagtgaacaagaagatagatccattgaagtattcttgtctgaggagtagatgagaaaatgaggagcagatgagagaatgaagaaaaataaacaaatctgaaaagacctgtgggacaccatcaagcataccaacacacttagcaggatttccagttggaggggagacagtgggagcagaaaaaatagttgaagaaataatggcccaaacttccagaattgaggaaacacatcaatctaactcagagggattcacataaaaacacagtataatcaaactctcaaaagtcaaaacaaagagagaatgtaaaaagcagtgggacggaagactaacagcggatttctcatcagaaaccatggaggccagaacgcgttgggatgacatatttaacatgctgggtttgggcacaggggtggggagcacccaacaaccaaaaagacgtcttcatctggcaaagtgatccttcaaaagtgaagaagtaacacattttgaggtaaataaaacctgagagctcgttgctgaaagatgtcccttacaagaaatgctatttcaggctgaaatacaaaggcagtcgatagtaagctaaagcaatatgaatgaagaaaggtcaacagcaaaggtagccatgttggtagtttgtatgtttataggagtttttccattacatcttggttatctaatttgttgggtacaaatattcatagtattcctttataattatttttattaacgtaaggtcagtagtgatgttcccattttcatttacgattttagttatttgaatctgtcttcctttaatcagtctagacagaggtttgtcaaatctgttgctcttctcaaagaaccaacttttttgttccttgattcgattgatttttaaaatttctattccatttatctgcactctagtctttattttctaccttctgctaaatttggattcactttgctctttttctagttccttaaggtgtaaagttaaattaatgatttgagatgtttctatttttttatgtaagcattcctagctatcaatttccctctatgtactgccttcattgcatctcgttaagttttgggttactgtgatttctttctcattcctttccaagagttttctatcttctctttgaattctcctttgaccaattggttgtttgaaagtgtgctattaggttacacatatttgtgaattccagcttttcttttgttactgatttctagtttccttccattgtaatcagagaagatactctgtatgattcaaatcaatttagattattgaggctagttttgtggcctaaggtaaaatctaatctgaagaatgtcccatgtgaacttgaggagagtgagttttctgctgtagttgggttgtgtgtttttgcacatatctgttagacccagtagatttatgtcatttttcaagtcctctatttccttattgaataaaaatttagttctgttattttatacttttttaaattagagagaatggcttattgaagtctcaaactcttactgtagaactggaactgtctatttctttcttcaaatctgtccatttttgtttcatatacattggtgatctgatgataaacatgtatatatttataattgatatatcttattgatggatggacattaatcactacataatgtcctgtgggcccagcccccgccgatcagtctgctccagcttctgtatgacagtggcttcctcatcaggctcctttcctggcctatggctggcccctccccagtagggccatcatgtccccaggtaacatccacgtggccccctgggcagcacatatcattcctcagttgctctcactagaagccaatacttcaggccccacttcctaaggtctggaaaattatggcagcctaataaaacaagctgataaatttaagactggtattatttctctcccagttgtttgagaatattcagcagggaaagtatttgggtctgtagttggctctgtaggaaagcttttgatgttagattcaagttatttaatcaatatgggatatttgtatttttgttccttttgtgtggattcggtgtcttgacaaatatagacagttgtgtctccaccaacgcaatcaatacatagactcctctcatcatcccatacatttccctcatggccatttgtagtcattccacatccccatcctagtccctggcagccactgacattttttttggtccctttacaattaccttttccaaaatgttatatgcatggaaccccatggtgcttagtattttgccatataacataagacttaaatagacccttccctaaagagcaggtacagatggcaaataaatacatgaaaacatgctccacatcatgagtcatcagggcaatacaaacttaaaccccaaaggactctctctgtatagctgtgttgactaaagtaacaacacatctgctgtgcaggactggcaagaatgtggggctttgctgatacgtttgagcttaaacctcccatctcattttggtttttgcttacgcaaggaatctactcccttttatctccttgctttactgcttttggatctagtgttttgagattttttatgcccccatcttcccctcactgtattagttccttgggctgccacatcaaatgtcaccaaaaaagtgacttataagagtggaaatttattatctcgcagttcttagggccaggcacctgaaatgaagatatccacagggccatgctttctcttagctccaagggagactctgtccttgctgcttctagtttctggtgctcccagcaaaccttggcgtcccttggcttatagctgcctcatgacaatctttgccttggctgtcatacgccgtcttccctttgtgtgtgtgtttgaacttccttctcctttctctgataaagacattagtcattggatttaaggttcactataacccggtatgacctcattttaactaatttcatctacaaagaccctatttctatgtaaggtcacattgtgagtgacatggtttggttgtatggccctgccaaatctcatgttgaaatgtgatctccactgttggaggtggggccttgggggagctatttgactcatgggagcggatctctcatgacttagtagtgctgtccttgtgatagtgagggagttctggcaagatctggttaagcgtgtagcacctcccatcccccactctctttctcttgctactcttttgccatgtgacatgcccactcccccttcaccttccaccatgagcaaagccccctgaggcctccccagaagctgagcagatgccagcgccatgtttcctgtacaacctgcagaaccatgagccaactaaactttcgtcttataaattacccagtctcaaatatttctttatagcaatgcgagaccagcttaacacagtgaggttctgggtggatatgacttttggggaggcaagattcaacccactacactcatctacttcctcctgagttgtatattctttcattactctagtggagattacaacatgaatctatgactttttaaagtctaatgtaaattagatcttatattatttcccagatagtatagtgtactaagactgctttaacttcatgtagccccctcctgaattttgtgatcttcttgccatgtatttcatttctataaatattttacaacttctaagacatcttatacagtaaatattcatttagatttccccatgttgtcctccttttgttacacttcatttccttttcgacttcttgcttccatctgtgatcattttcattctgcctaattatctttttattttctgtagtgcagatcctactggtgacacaacctctcagcatccagagaacatcattttcctgtcctcatttttgaggatcttcttcccaggtgtagaattctagcttggtgcttcttttctttcagacagtaaatatatcattccatcatcctctggctgccatcatttctactgagaagtcatctgtaaatgctattgttgcttctttaaaggtaatatttctttttttttcccttggctgtttttaaatttttctctgtctttggatttcagccccaatatgcacaggcatggtttcctttgtattcaccttgctaaacattcttaaatgctttttgcatctatgggttaatgtttttcatcactttaaacttcttgtctattaaaccttcaaatattttactacccttattttactcatctcctcctatgatttcaaccatttatattcataattatttacaacataagggcatgcttactactccactttcttcatttccctcttttctttcccatctctgtactcagggctgaatttcctcatctccctttcttcactaatcttctctttggttttgtctaatatgttgtctagctaatctacttagttcttaatttcagctattatgttcatttccagaatttctgtttgattccatttcataaatctagtttgacactgaaattctccatttgtcctctggttttttgagcaagctaatcagcattattttaaattccagtttgacaattctaatatctaaaggtcctgtgtatctgtttctcttgtttgctttttcctcttggtcctttggtcagttggtttgtcttctagtagccctagtaatttttgactgaatccaggacttcatgaaaatttccaagatgatttgagcctctgttgatgctgctgtctccagaagagatcacttttgtttctgggaggcacttaggctacaggcagatcatatgagttcaatacgagctgatttaaaggtgggcttcattcttctttccgttttttccttcatcctagggcgtaatccttcacttatattcactgtttccaactgacagtctgttgttgttgttgttttaccagaatccctcctccttgtcaggtcctgaactctatgtttttgtcttccaattgtatgagactactaaaagctgtgctcagcctcagcctcatggctgtagtctgtgaatcagtaaatgcctcaataagaaaatccagaagaaatattagactcacttctgtgcactttccctctaatagggattcactcactcaagtctcagctgtcttggtgactcctggtgccctcaaatagagattttgtttgttaaaccaggtttcctaacttttctcagctagatggccagtctgatgtcagccaattccccacacacaaaagcagaacttgacagagagttttatacagcataagaaaaaggtagcataatggaatcgttttcagaggtcaaaattactcttcgataatttctccaaaaacatttattatttcagcccatttttatgaaggatcttccctattccaggcattattttaggccctcagagactgagtggtgaacaagacaaccacacttcctgcccacatgaagcttacctttgaagaatgggagctgagcacagcaaagaaaatgagcatgaaaagttaggagacttggcacagaaatactgatgatgggccacgcacggtggcttacgcctgtagtcccagcaatttgggaggccaaggcaggaggatcacttgagcccaggagttcaagaccagctgggcaacatagcaagactctggtctctacaaaaaaaatttttttttacaaaaagaaatattgataatgggacttgaattatctatgattgaagcgtatcataaagctatggcctgaaagagcagaaccaaatccatagcccaaaatggaccagttcaaaacttttctatcctgtctgaaacccagtcctatccccagcgttcccacatgcaagtctgagtggacctcggggaaggccgcggggagcggcatggcctctctttccttgctccccttctccctgttttgggctctaatttcttcagtgatggggacgggggaaggaatgtgcagggccaccactgtggggctcactggccactgctgcaccttctctccggctgctccagtgatcctgtgcttctaccagctgcttctgcctcttcagtgaggacccactttagagacacccccagggacagtagctggaggactctctccctgggacaccacactttgcgtaagactgaagggccacccctgcctccacagcctccttcttacaacctgggcagcactggtggggtgtggcagctggccatagctggtcaacttctgtcttattttagaaaccctgtggggacaggtctgacccagaatgttagcattatttttagaatgagaggccgtttccagctttgccagattcacagcaacaaagacgttctactcaacatcgtgtaatacgtcttactttataatgaaatatgcgtatgtgtacttgaatttttaaataaaaatgtgaaatcacaatcaatattataattagctgctgggtagcaatgttcctggaaagtgatcagggccattttataaggcaagaagctcgggacttcatcatgccctgtggtgataacaattcatcatcaaagatcatgcagccgtgagagttgcctgtggctgacctgggggtgtgtgatggggcctgtgggcagggctggtgagaaaaagatgcttgcagtgcagggcacacggaggagatggctccagcagtggcgagggctggcggctgcctgctgcctagcacagctacttcacgggttcagaacccgaaaccacagcccacgatgctgccattgtgcctcagcaaggagtgggctgagcccacgatccctgccctggaacagagtcctgctgcctcccaagcaaaggacagggtgggcaatgaacagagggcaggaggcacagaggccatggggattagaaattggcgagtcctgtgtcctacagcaggggaaggaccatactagaggaggagtttgcaccacaggaaataattcctaagggccggcttcctgcagaggaagcccgtgtcctgaggctgctggggccagtggctggacgatgccccagcaaccaaagatggccccaggcacatcccacccacatcccacccaccagacgcccacagccgtccttgcctccagaacccagctgggatcaggcccaccccaactcctgcccctgaggttccacatgcaacagactatagcccaggtgtgacaggagatttgtgagctgggcaatgtcaccagcaaacaaacatccctaatcatggcagacgccgcctctcagcaacaaggaaggggaagctgtgggccctggaacaacaaggccaggaggggtataaaagcctgagagccccaagaacctcacacactcacaaactcactcactgacacactcacacactcacttacacctcccccagctcacctcctccccaccccagcatggccgcgtccaccatgtccatccgctccagcgcttactccgactcctggcaggtggacgactgcccagagagctgctgtgagcccccctgctgcgccaccagctgctgcgccccggccccctgcctgaccctggtctgcaccccagtgagccgtgtatccagcccctgctgccaggtgacctgtgagcccagcccctgccaatcaggctgcaccagctcctgcacgccctcgtgctgccagcagtctagctgccagccggcttactgcacctcctccccctgccagcaggcctgctgcgtgcccgtctgctgcaagcctgtgtgctgcgtgcccgtctgctgtggggcttcttcgtgctgccaacagtctagctaccagccagcttgctgtgcctcttcctcctgccagccggcctgctgtgtgcccgtctgctgcaaacctgtgtgctgtgcgcccacctgctctgaggattcctattcatgctgccaacagtctagctgccagccagcttgctgcacttcctccccctgccagcagtcctactgtgtgcctgtctgctgtaagcctgtctgctgcaaacccatctgctgtgtgcctgtctgctctggggcttcctctttgtgctgccagcagtctggctgccagccggcttgctgcaccacctcctgctgcagaccctcctcctctgtgtccctcctctgccgccctgtgtgcaggcccgcctgctgcgtgcccgtctcctcctgctgtgcccccacctcctcccgccagcccagctattgccgccaggcctcctgtgtgtcccttctctgccgccctgtgtgctcccgcccggcctgctacagcttctcctcaggccagaagtccagctgctgacggtcatgtcccccagggccagccgggctcaggccccacctccctgccagtccttggacctcccagcccacccagcctcagcacagctcaacacagaaggagcagccccagccacagccgcccagccccggggtctcagatgctcactggctcctccctgacctcccccccgggcaggcgagccctggcttctcctcacggtgcttcctggctgcagaccacaaccctccgctggtcgctggttggggacgggccctcctgacccgggtctcacccccagcagcgtcaccctctgcccctgagcaccaataaagcgtctgcggccccagctgactccgtgctgactctccgcacccagggcgggagggggcagagtggggcctggcctggctctggggggctgggccccgtggatctctttacttccccagctggggggcctcggggggctcttgtgtgacacctggaagctcctgtccacctcgtggcacgttctgctgtccggctcccctcccaggtcctgtggggcccaaaagccttgttcactggctgagtcccacagacaccacgtgactcaggctaatgccccactcactgtgggtagaagcagctccttcccatggcaagggttggggctgtcccggggggtggcaggccccagctgtgctgggaggtgggagacgggcggtggggggtgggtgtggagacttgggctccagctgtcccagcactcaggagttccactcggagagagcttggccatcctggcctcctgtggacactcacagacgctcagggatggcccctgctccagccctgggcttgccgctgggatgcagagcagagaacagacacgtggtctccagagctccctgtgctgggctgggtgggtggagggccggtgggaacaggaaggtctcagggcggcgatgacagaggagtcccaggacagtgtgggaatgtgtccagaccagacagcaggaaggaggcctcctgggggtagtttcttagctcctgccatgggagacaggcagatggccagagccacactgtcccctccagtcctcacccacaccccccacactggtgacccggggctgcgatgccgcccactcttctcgccttaggagagcatagtcgggtttgggggcctcggccataccctgtgggcacaaaggacccccacacctgagaggagctgcatgtgtcagctcaggctgctgtgacaaagtccacggactgggggctcgagccacatacatggggtccctcacagtcctggggctggaaattgaggcccaggtgtggcagggctggttcccgaagactctctcttgggcttgcagacacagtcttctccctgtgtccttacggggctgtccctctgtgtgtgtctctgccctcatctcctcttctcaagaggacaccagtcattggattagggcccatccataggaccttaacttaggacttcaacatgtgaattcgggggcatcacaagtcagcccatatcagggggctctggctttggcccttgaggcaggagtgagggtggcagtgaggccacctgtgcctcgaagatccccagtggggcctggctggggcagacgctccctgtccataaactgcagcgatggacatttggacagagacacgaccctcggggaaattctgctcacatggactccttcacctgctgaacaacgctgtccagaggcctcagacacccaccaaatggttcctgtttaggcatcctgttgtccccagtgcctggctcataaggggaactctcactggtcccaccgcaggaggcacggctcgcttccagaaggggaaggtggggatggagcgcaggccaggcagctgtgctggaagagacaggccacacagggatgggtgcagggaaagtgggggccacagggctgtcgcgggggtcaggagcatcttgcacaggcttcctgagtggtatggagagtgacctagggcttcaggggccgtggtacacacactcacagtgatagaaaccaactcaggatttaggaatgggagttcttggagaccttgatgaggggctttccagtcacattctgtgggcaggggcatcctgtggtgggcagagggggaacaagcactggggaagtgaaatgtgaaggtaaataatttcttctctaaagatctaacagaacaaggcaggagaggagcacagtagtgacggcttcctgaaggactaacacacagggcttgccttatttcgccaactcagattccctccagccagagaagcagctacacagaggcttggtcagaacatttaaaggcaaatgaaccagtcactgccacctggacaaaggatatcagttgagaaaacaatggacaccccaaaaaacctgggaggaagagctgagaaattagatgctttgggaaataagggcattggaagattccacatattcttgggagtctataaggcccccatgcatgcccatgatggggcacagaaaagacctgagaggctctcagtgctcacctctggctgaactgcaggctctgagcaagcaggaagtgaaggggagggcaggaagtgaaggggagggcaggaagtgaaggggaagtgaaggggaaggcaggaagtgaaggggaagtgaaggggaaggcagtcgcaaaccgcccaggtgagcactgagggtgtggaccaacacacagagtccagctataaagactgggaaaaaaacatcttttgactccaggtgtttaagaaactctgtctaattactatctgagcactaagcaaatggaatagtgacccccttcatgacaaagagtatagtcattactaaaatagtttaggaaagtcacttaaaaacaaaacaaaactactagccacacaaccagcaacagcaaaccacagggaagagggagaatgtgccatccagaattatcaaattataatattccaaatgtccagttttcaacaaaaattatgaggcatgcaaagaagcaagaatgtatggttcattcgcagtaaagaaagaaaaaaaagccaagtagtgaaaaatgtccttgaagaagcccaggattgaatttactcgacaaagtctttccattaactcttttaaatatactcaaagagctaaaggaaaccatgacaaaagaacaaagagaaactaagaaaacaacatctcaaccaagagagaatatcaataaagagagagattataaagaggaatcaaatagaaattctggagttgaaaagtataataactgatatgaaaatttcactagagaagtcccacagccgatttgaacagacagaaggaaaaattagagaacaggtagataggtcaagtgaaatactccagtctgaagggcataaaaacaaaaagaggccgagcgtgatggctcacacctgtaatcccagcactttgggaggctgaggcaggcagatcatttgaggttgggagtttgagaacggcctggggcaacatagtgaaaccctgtctctactaaaaataaaataaataaataaatagctgggcgtggtggctcatgcctgtaatctcagctactcgggagcctgaggcaggagaatcacttgaacctgggaagcggaggttgcagtgagccaagatcatgccactgcactccagcctgaatgacagagtgagactccatctcaaaacaaacaaaaacaaaagaattttaaaactgaacagagtttaactggcctgtaggacaacatcaaacataccaacagcacacttaacagcagtgtcagaagaagagcagagagagaatggagcactcaaaactatttgaagaaaaatgatagagacagaaagtaaaatggtggttgccaggtgcctggggggaggaggaggaatgtggagttagtgtttaatggggacagagtttcagttttccaagatgaaaagttttgaagacggatggtggcaatgaccgcactgcattatgaatgtatttaatatcactgaacggtacacttaaaatgggataaatttcacgtgtatttaactacaataattttttaaatatttgaagtaataatgaccaaaaacttcccaaatatgatgaaacacattgaatctacacattcaagaagctccatgagcttcaagtagaataaactcaaaaagatccacacagaaacacaaaattaaattattgaaagccaaagacaaaacaagaatcttgaaagcaggaagagagaagattaacagccaatttctcttcaaaaaccatgaagaacagaaggcaatgggatgatgtacttaaagtgctgaaagagaaaaaaactgtccaccaagaagtctgtgtccaatgaaatgattctttgaaactaaaggagaaattaggacacttctggataaataaatgctgagagagtttattgccagtaggcctgccctacaagaaatgacagctcaggatgaaatcaaagggcactagacaataacttgaagccatattaagaaataaagaactggctgggcacagtggctcacgcctgtaatcccagcactttgggaggctgaggcgggcagatcagaaggtcaagggtttgagaccagcctggccaacatagtgaaactccatctctgctaaaaatacacacacaaaaaaaaatagctgagtgtggtggtgggcacctgtaatcccagctagttgggaggctgaggcaaggagaatcacttgaacctgggaggcagaggttgcagtgagccaagatcgtgccactgctctccagcctgggtggcagtgcaagactccatctcaaaaagaaaaagaagaaaagaaataaagaacactaataaaggtatcagttttggtagtttgtatgttaataggaatttatccattacatctaggttatctacattatgaatgtatttaatatcactaaacatgcttaaatggaataaattttattgattttatgtgttagtgtacaattgttcatatattctcttatagtcttttttatctatataggtcagcagtaatgttcccactttcatttctgattttaataattagagccttctcttttttctcagtctagttaaaggtttgtaaattttattgttgctttcaaaaaactaattttaggcttcgttggttccattgtttttctattctcaatttctttatttgctccctgtattctacatataatctttattttcttccttcttctaggttttggtttagtttgctcttccttttcctggttccttaaggtgtgaagttagattactgaattgagatctttcttgttttttaatataagcatttatagctacaaatttccctccataaactgttttgccgtatcccataagttttggtttgttatattgtcactgtcatttatcccatagtattttctaacttctcttttgatttattcttcaatcaactggttgttataagtatgtgttgtttaattgccacatatttgtgaattttccagttttccttctgttattgatttctaattcccactgtggtcagagaagatacattatatgatttcaataattttaaatttattgagacttgttttttggactaacatatggtctaatctggagaactgagaagaatttgtattctgctgttgttgggttgaatgttttatacacggccatattagatctagcttgtttatagtgttcttcaagttctctatttcgttattgatctttgatctagttctatttaaaaattttttttaatcagtggaagtgacttattgaagtcttcaaacattattgttgaactggaattgcctatttctttcttctcttctttccatttatgcttgatatatcttgggggtctgatgtttgttaggtacatgaatgtttataactgatgttaggtacacaaatgctataaaatgatggcttatgcctgtaatcccaactactcaggaggttgagatgagaggattgtttaaggccaagagttcgagaccagcctgggtaacagagtaagaccctggtccctaaaaaaatatgttttttcattagccaaatatagtggtgtgcacctgtagtcccagctacctgggaaactgaggtgggaggatcacttaagtccaggagtttgaggctgcaatgagttatgattgtgccactgcactccagcctgggcaacaggctgagcaataccctgtctctgttttaatggtgctaggacaactggatatctacacacaaaatcataaagttgcactacatctcacaccaacaaattaactaaaaatggatcaaagccctacatatatgagataaagccataaaattcttagaaggaaacataagagtaaatatgtatgaccttattttgggcaatggttttttagatatgacaccagaagcataagcaacaaaaggaaaaaatagataaattggatgtcatcaaaattaaaaagttttgtgcatcaaaggacactatcaagagagtaaaacaacccacacaagggaagaacatgcttgtaaatcataattctgataaggatctaacacccagaatatataaagaactcttataattcaacaacaaaaagtcaacccaatttaaaaataggcaaagtcctttaatagacatttctccaaggaggatatgcaaatggatgatacacgcaggaaaagaagctcaatgttattggtcattagggaaacagaaatccacaccacaatgacatgctgttgatacttcatacccaccaagatggctataatttaacacacacatacaccaacaaatagaaggtagcagatgttgacaaggatgaagagaaactggaatgtttgtacattgctagtgagaatataaaatggtacagatgctgtgaaaaacagtctggcacgtcctcaaaatgtaaacatggaattccatacaactcatcagttcccactcctaggtatatacccaacagaattaaaaagaggtgttcaaacagaaacatgtacaagaatgtttatagggccgggcgcagtggctcatgcctgtaatcccagcactttgggaggccgaggcgggaggatcacttgaggtcaggagttcaagaccagcctggccaacatggtgaaaccccgtctctaccaaaaatataaaaaattagctgggtgtggtggtgcgcacctgtaatcccagctacttgggaggctgaggcaggagaatcacttgtacccgggaggtggaggttgcagtgagccgagatggggccactgcactccagcctgggtgacagagggagactctgtctcaaaaaaaaaaaaaaaaaaaaagaatgtttatagaagcactattcacactagccaaaagttgaaaagaacccaaaagtgcattagcagatgaatggataaatgaaatgtggcgtgtccctttgatggaatatgattcagccaagaaaaggaatggcgttctgaaacatacccaaacacaggtgtaccttgaaaacatgctgagtgaacaaagctagacacaaagaccacatattccatgactgcgtctatatgaaatgtgcagaacaggcaaatccatagagacaagcagaatagtattggttgccaggggctgggcatggctgcttaatagtaccggggttccttcgggagcgatgatagtattctggaactaggtagtggggatggttgcacaacattatgactgtactgtcactgaattgcacactttaaaatgggtaaaatggtacattttattttatggttgatcacaatttaaataaaattacacctgccaagggtttctaagaatgaagcccctcgctctgcaatgctggatattatcagcattttaaatcttgtttgctcttacaggtgggagacgtgtgtttaaacctgagaaactttagttattaatgagatcaactagctgttcatctcattcatgcttattggaaatttaaaatttttagtcttctattcatttcttttgtatcttatcctgttttagtggtaaggacttcaaatttttcacattaatcttccacctgtcatggagattacaagtactttctggcagttcatatcttcatttgtgtacccaatgattccttcagggctgtgatgggaacgtcgtggatgctgagctgagctgaggcatgtggaccggtctccagcacccaaccctgccgggtttccaggggacatacgttgtatgtgttctggtcaaggtttatgctttcgttcacatctgaccctctgacattccactgggcattttatacttgggtctgctggctgacgggcttcctttcccattgtatttccacactgtcatggcaggggtacaggtagggggtgctgggtgcagtgactttgtctctcatccagcccttcagtgagcgtggcctgggacagtcactctgatcctaggtggacaatgatgtcacctacagatactagaaattcacatcacatttcaacttcttggcatgtggcttcagccaaagtgcaaacatagagtaagaccaggcgtccgggcagtggggctgactgtggccccatctgacacttttctcatccagaccccaagtatcctccactctccacgcaaccctcactccacacctgcctctccaaggtagaggcccctccccaccctcagaccctgacctgcacccgcccctctcaggacacctgaccagggctccaggggatggcagtccagacccaaaggccagtccccaaaccttgtcctcctaatgagctgactgtccagaggccttgccagaacattccatctcctcagaggaggggaggtcctccctgtcctcctgcccttggcagacatcaggatctcagaagatcccagagcccgccaggaagcgctgtcttcaagcatcttttcccaacacaggcacctccgtcctggctctcccaatctcagccacgccagcccaccccgtgaggtccctgcagacagaggctgggcctcccccaggctgagggcccacgctgggcacagtcacgggacctgccaggtggaagtcaccaggtcagccccagagaggtcacaccttccctcctggtgttcccgggagacaggctcagccaggggcgccggtcctgcccaggaccagccaagtgttaggagcagagtgaggacaagtcatggcaaaggaagcagaaataatgagggtcctcccggctccaaacaccaacacggaaggggagggcattgctgagtctcctgctgggaaaacacaggccctgggcatataaaagccccagcagctgacaggctcacacacacactcactcacacactcactcactcacacacctcccccagctcaccgcctccccactccagcatggccgcctccaccatgtccatctgctccagcgcctgcactgactcttggcgggtagtcgactgcccagagagctgctgcgagccctgctgctgtgccccagcccccagcttgaccctggtctgcaccccagtgagctgtgtgtccagcccctgctgccagacggcctgtgagcccagcgcctgccaatcaggctacaccagctcctgcacaaccccatgctaccagcagtctagctgccagccggattgctgcacctcctccccctgccagcaggcctgctgtgtgcctgtctgctgtgtgcccgtctgctgcgtgcccgtctgtaacaagcctgtgtgcttcgtgcctacctgctccgagtcttccccttcatgctgccagcagtctagctgccagccaacttgctgcacctcctccccatgccagcaggcctgctgtgtgcctgtctgctctaagtccgtctgctatgtgcctgtgtgctctggggcttccacttcatgctgccagcagtctagctgccagcctgcttgctgcaccgcctcctgctgcagaccctcctcctccgtgtccctcctctgccaccctgtgtgcaagtccacctgctgcgtgcccgtcccctcctgcggtgcctctgcctcctcctgccagcccagctgctgccgcacggcctcctgtgtttccctcctctgccgccccgtgtgctcccgccctgcctgctacagcctctgctctggccagaagtccagctgctgacagccctggatgtgatccggagtcccttcccaccaggggctgacctcccagctgccccagcaagctctgccctctctggctttgacaccctcagaaggtggggcaggctctttgtcttggggaccaggatgctcccccagtccttcccagatgatggctgcctgtgggaccccagctactcccccagacccaagttctgcagaactaacccccagcaggcctggttccaccctgggcagcaccccctctagttctaataaagccgcctctgtctcacaccaacctctgtcctgtctgtggacccccgggggggcacagggtgaggtgggaagtgatgccacccctgactgcagggagagtcctgacccccagcaggcctggctccacccctctgtctctgtcgaccttccatcctgtctgtggacccccgaggggcatgggatgaggcaggaagcaatgccttctggtgctggcctctgtgaaccctgaaggccagtctccctcttagccccgtgggcccccaaccccagcacgtggccccccggcccatcttaggaaagctgcctctggaaccaaggccaggagtttcgggacaaagtggaccctggcagcactctgggcccctgagccacattcaccctccccagctccatggctgccccccaggcctggggtagaccacctggggcctggctccacccagcagcctcacccctcctgttacccctggggagaccagctatggaccacagtgctcatccctgcagccctcatctcctccacagtaagacattgggaccacgccctcccccaggactcgagcccagcagcccagtattcatggggttctggaatacccattgctcaggcatcgctggcgagagcacagatgggcagggaccatggcacccactaaccaagcctgcgggcccccctgccccatgcggcctcacctagacattcagggtcctggctcccttttggtcccgtggtcctggactctgaccccgaggaccctgtccccgcacccccagcctcccaggtctctcccaaatagccctcagctctgcctgccaccctccgtcccagatgccacgtcggggaagtggcacaagctgctgcactctttccgccaggtcgctgtgcgcatttgagagcgcacgtccggctccagcaaatgacccttgcgtgtcaatgacagaggccgccagccccagcaccaggacctcccggagtcccaccccacagagctccctgtggtcagcacagccgcctcgctcactcccctcgaggcagatcacccaggacaaccagcagcagccgtccccagggctggtggccaaactgacacagccttgtccacctccttggaagcaaagccaagtccccatgaaaggacaaatgggggcctccagggacagagatgtttgtccaaaaacctgccccggtttttggggcagctggcaggggccgagccttcatcctaggtctccggggccatcctcgggaggggctccccacacatgcatgtctgagccccacatcactgtgctcactgatggccacagggtcagaacagagagccaggaggagggcccggggctggctctctgacctcctccacatttgccattgtccccaccttccctgtccaaggcaccgacaggacccagcctgtctggccgtccccagggaggatacctcctggtggggggtctcagctctgactcctactctgggtcctcattcgatgtgtcttctgcctcatcagagcttcaacccccagtgaaagcaccttggaaaacagttcctcaaaatgtcactcactgtgtgaccctgtgaccctgtcagtccagttctaggcatctaccccggaggaatgaaacaaacgtccacacacagatttctgtgcccatgtacacagcaccactgacagtagccaagaagtggaaagagcccaaatgtccatcagaggatgaatggacaagcaaaacacagcctatccacacaagcaaaacacagcccatccccatgggaatattattcagccatgaaaagggatcaaatactgacacaggctacaacatgcatgagccttgaaagcatgatgctcagcgagtggccacatgtggtgggattctatttgtatgaaagactcagaacaggcaaatccgcagagaaaggaagtagatgagtgtgtgaccaaggctggtggaggggctcatgaggagtgactgcttatgggtgtggtttttggagtgggaatgttgtaaaattacatattggtgatggctgagaaacactgggaatatattaaaaaccagtggattgtgcacttacagtgggtgaacttcatggcttgtgaattttctcttggtcaatgtgttaaaaacaaatagtctcagccctccatttgggatggccactggccaatgcctccacctccccttcatccagataaaaatgaatggcgccagagcagtgatagaaaatggaggcatgccatccacagaccaggtcagtaaggattttctgggaaaggcaagacaaaaagatcaggttctattgactttaaatccaacagaaagaaaggcagaaggactctgaagacaaatgacttttcccggagaccctagcaaagggaccatacatgaggatgactgtgggcactcagtggtctttaactgatgggtcgagttctgaagaagagccattccatgcctgcaaccagcgggagaaccaggaagggtggggttggcccaggagactcccagcctaggtcccaatctggagaggaagaggccacgccccaggaagctctggatgccaagatgaactggagcccccatgtccaatcagcgatgaacaaggcccccctcatcagagccccagcatcagctctggatgcagaatatgtgtatctatgtgcagaaaacctttcagcaatgaatgccaaacaatctagaccctcacttaaaaatgtgaatgacaactaagggtcctcagacatgtgaggaaatcacagcatgacagagaagcaaagtctgaacaagcgatgatgcagatgtgaggaaacaaagaggctgtcactccatgaaacaagaacagggtgctaccaaaaaggaggaggaagaggaggaaggaaaacaccccaagttccaggagactgaaagcatgacactctcaacacagatgaaactcaatgatggtctgcataatagaccctgaaagcagaattgctgatacagtgaccccagttcaggcaaggattgacccaaacccaatgcagaaggacagagataaagccaagaagagcctgagatctgagtgggaagagcccaggagacccagggtctgtgatcctaaccgggatcgcagtggggagaaaatccaagaatggaagaaaatcatcagacccatatgagaataaaagttttttgaactaaaggaagatgggatcgaggggatgaacacagctgatgacagtgacgagggaggggtctggtgaaatgaatgaagtaaaagaaagagacaatagtgccaggttctagacagaggaaagacttcacaagaagatcaaagttatgcaaatatgagatgcattggtggcccagcctctaccaaggtggagggaagaaattccgcacctagactctgctgtggcaggcttcagcgggaaggctgttcttaaacaacagggatccggaaaatttaccacccacaatgctttctgaaatttttactcagcaatttccaacaagaagaaacacgaccccctcttttcaaacgtccacaaaaatccacagacacccatcaaggaaaatctaaagaaaataaaaataaagtctaataaaaataagcagacatgaaagatggaaaaagaagtatgctcacagattcagagattttcctgtttcagtataagaaaatagtatgggtatatttatcctaaaatttggaaatataaattaaatgtactgtgtcctaaaaaatataaattacctaccctgagtaacaagacaaaaattttaatacaatgatatccaggaaaatatggaaatggtattgaaaaagctcattcttcagaaggcagactcagatgtttcaaagatgtataccatcagccttcaatacaaagacttttctgtgatacttgaaatattccagagatcagaagaagccagaggtcctctggattcctctagtaagactggtgacatcctgatgccaaaaccaggaataacagcgagagagataggactgtagaccaacatcatttaaaaaaataatgtaagagattgtatgaacctacaataacagaaaactaagccactatgtatagccattatgggaaatagtacggaagttcctcaaaaaattaaaaatggggccgggcgcagtggctcatgcctgtaatcccagcactttgagaggccgaggcaggcagatcacgaggtcaggagatcgagaccatcctggctaacacggtgaaaccccgtctctactaaaaatacaaaaattggccaggtgtggtggcaggcgcctgtagtcccagctacctgggaggctgaggcaggagaatggcgtgaacctgggaggcagagcttgcagtgagccgagattgtgccactgcactccagcctgggcaacagagcgagactctatctcaaaaaaaaaaaattaaaaacttaaaaattaaaaatggaactaccatgtgatgagcaatcccacttctgtgtatttaaacaagacaaattaaagccagagctcagagatacctgcactgccatgctaactgcagcactattcacaacagcaaagatacggaagcaacataagtgatcatcaacagatgagtggataaagaaaatgcggtgcatatgcatgatggaatacgattcagccatagaaaggaaggagatcctgtcatctgtgacaacatggatgaacctgcacacactatgctaggtgaagtgacccaggcacagaaagacaaatactgcagacctcacttatttgtggaatctaaaaaagccaagttcaccaaagcagagagtagaatggggattcgagggccagggggtgcagggagtggggacatgttgatgacaggatacagcttcagctgtgcaggatgagtcagttctggaaacctcatgtgcagcatgaggacagttgactgtaacacagaacgcaacatagtaacaccgaaatctgctaagagtccatcttaaatgtctcatcacaaaataaaggtaactacatggggtgatggacatattaattagcttgaccgtggtaatcatcacacaatgtgtacatgtatcaagacgtcatgttgtataccttgaatttatataattcttgtttgtcaattatatctcaataaagctggggaaaaagggataatgagctattatcaagtaatgtatatcttagatcactcaagttacaaagggtatcattaactatactcataaaatagaagcagaaaagccactggaactctcagtagattaatacacacacattcacacacatacacacacacatacacaaacaaactcactccttccttaaaagcctgaggcaaaattcatgataaactaaagtaggaaaacactgcatgcacgagaccaaggctgtgcgacaaagcagcaaacatcggcttagtgcggagttgcgggaagcatttctgttaactttggaaacaagaccagagggctgctgtcatcgcgtctccagcattgtgctgggcagccagccacgacgaaagggagtcaaataaaacaaaagactacgttttggaaaagaagaatccaaatgtgtgtcacttgcagaagacctggccgtgggccaccctgccctccagactcacatcccctcccggcacctccctctcccagccagggccatttaatccctgccattcaactcactcagatccccagagtgtctgcttgatttaagaaatggtttgatcatttgattgtccacagaagctgccctgctggcccccagtggaaagttccatgatccaaaaagtcatgtctccagtgagtccagggctctacagttgcacctcatgttgtggctgacgtaaaaagactgtacgtgcactgtgtgtgtctgtagtacatccactaatacgatgtcaccctagacttcctggctttcctatcatctcctgaaagcatcaccaagtccttcagtcccagaaagcggattaagcacacagatctcacacacctgtactaataatcactgaaaggatatttaaagagttataaaaaatgaaatcaaaattatctaacaaaaacgggaggctcagcagggtccttcatatgtttgtagaaaagagaagcagacagaaacaggttagggagtaaattggagcaggaccctaatgcactggaataaaatagtcttttattcagaaaactgaatgaactgccaccaatgagcagactatctgatgtccaaggaaacaagaaaaaaacatttaaaaactcaaagtaacatcatcagagtgaatggataacatatttcattcatcacaagatgaaataaaaagtcataaaaagagagaccaggaaagatgaaattattattaaaaatggaaaaacacttcggagataagtctttatattgaaaggctcaataagttctaaccactgaaagtaaaataatgcattagcctagaaacaaaagcgtgacactttagaacaataaaaagaaacccaaatgctcccagagagttaaggaaagagagaaactaaaaaatgacaaatgaccagtatcagactgtcatcggcaacactggacatcacaaaaaaatggtgacatgtgttcatcattttgaggaaaagtaatttaaaaccagaattttatacccagctaaactatcattataaatgtgaggataaagttgacatattttcagacaagcaaggaatcttaaaatgtatgtcctaaaatcaccatatatgaaaaagtacttgatctttcaccaaggcaaaatgaaaattgaaataatccagagtgcagcttcaaataaaacaaagagcctctgagggtggcatggaagagctgaagagacaaaaataaagcttggatccaccagctactgaatctctgagcattctccttacaaggtgtgagggatcgaagggagggccacttagcttttttttttttttttgagacagagtcttgctctgtcacctaggctggggtgcaatggtgcaatctcagctcactgcaacctccacctcctgggttcaagaattctcctgcctcagcctaagtagctgggactacaggcacatgccaccatgcctggctaattttttgtatttttagtagagaccgggtttcaccatgctggccaggctggtctcaaactcctgacctcgtgatccacccacctcagccccccaaagtactgggattagaggcatgagtcaccacgctcagccagcttcctcttatcttatcgtctgtgccgtttttatttcatatgaagtgtacatttttctccatgtttatgttttaagatgctaaaagtaataaaatatatctaatcagtccagaaacaggataggtggaaacagaattgcttcctttggagaaacgttcatctctaaaacctcaactcaacaaaagcttgcttgaaatattttccggccggacgcggtggctcacgcctgtaatcccagcactttgggaggctgaggcgggtagatcatgaggtcaggagttcaagaccagcctggccaagatggtgaaaccccgtctctactaaaaatacaaaaattacagcgtgcctgtaatcccagctactcgggaggctgaggtgggagaatcgcttgaacccagggggcggaggttgcagtgagctgagatcgcgccactgcactccagcctgggtgacagagcaagactccctctcaaaaaaaaaaaaaaaaaaaaaaaaaaaaaaggaaatattttccaccacatttctgtggccaaaataaaaactgatgaagaaacagagccctgcgacatacataccagtttaataagggaaaaacaaagagataaaccagcatgaatgatgcatctccagccaccagctgtaaacaccaacaaggaagaaaagcttgtggagcctcctgttgggacaacacatgccagggagggatttaaaagccccacagccctgagcacctcactcactcactcacacacacactcacacactcacttacacctcccccagctcacctcctccccaccccagcatggccgcgtccaccatgtctgtctgctccagcgcttactccgactcctggcaggtggacgactgcccagagagctgctgtgagcccccctgcagcgcccccagctgctgcgccccggccccctccctgagcctggtctgcaccccagtgagctgtgtgtccagcccctgctgccaggcggcctgtgagcccagcgcctgccaatcaggctgcaccagctcctgcacgccgtcatgctgccagcagtctagctgccagccggcttgctgcacctcctccccctgccagcaggcctgctgtgtgcctgtctgctgcaagactgtctgctgcaagcctgtgtgctgtgtgcctgtctgctgtggggctgcttcttcgtgctgccggcagtctagctgccagccagcttgctgtgcctcttcctcctgccagccggcctgctgtgtgcccgtctgctgcaagcctgtgtgctgtgtgtccacctgctctgaggattcctcttcatgctgccagcagtctagctgccagccagcttgctgcacctcctcctcctaccagcaggcctgctgcgtgcctgtctgctgcaagactgtctactgcaagcccatctgctgtgtgcctgtctgctctagggcttcctcttcacgctgccagcagcctagctgccagccagcttgctgcaccacctcctgctgcagaccctcctcctctgtgtccctcctctgccaccccgtgtgcaggtccacctgctgtgtgcccgtctcctcctgctgtgcccccacctcctcctgccagtccagctgctgccgcccggcctcctgcgtgtccctcctctgccgccccgcaagctcccgcctggcctgctacagcctctgctcaggcaagaagtccagctgctgagtgctcaatccttgtctcctgctgactgtgtctttgctgccaagcaggattctccagtctcaggagcccctggagtcctcagaatccaccagctccatcagtagccacagagctgctgcctgaaggggattttgagcgcgtcacactttcctccccactgtctgggaagagacaacccacaaatccctcagcaggtggactgtggctttctggagcccccttctccaaatgtgttgcttatacccaatgtgacaaagaagaactgctctaatcaataaattcttgagtcaggaaatacgggctggtgtgcactttctgctcttcccctgagcccctctgcctactccaaatttggggtgtgggacccactgtcttgttaaaggcagacaggacagtgtctctcattccgagatcaaacacttggaagacagcaggctttgaaagcaaatgtgatcagctccacactcttcctgcagccaaagccctgcccacaggggatgagcctccaagctgagccagggaggggagcagagctgagtgggctcggcctctggtgagctttgggccacccgcccatgcctgtcccctgccagtccaagctaaagctgagtcgggaagaagcagaaatcccgttcagttgggacctgagagccccaggcaccgtgctggcctcgtggtgtgtgggccgtggaaaaggtgcccacacagagggctgccccgagagtttgagggccactctgtgtgctctgaagcactagcaatttcatgggccccaagaggggtcctggagttactcagacgtcactcatcctactcagggtttaaggcctgggtgaggagacacagagcaaaaagacaccttatcgatgaacccttaggacagtgggagaggatgaggctgtagtctcagtggaccactagcactggagagtgaagagggcactagtgagaccagtcaggtcagcacctcctcaggaggctgggagggcccagggaagaagcaacagaacaaaaaccccaagaggaccttgaaccagaaagtagctgaatttaaacccacgtggactcataaatctctcagtcttccagagtttattcaacccgtgtccgttacttgcttattcaaatattaagaaaaatacggccatccccataaataagtggacaaaggccttcatggacctttcatagcacaaacagttaaaaaaagagggggagatgtttccacctcaccactaaccaaaggaacaggggagcctaaggcacaggggagtcggcacagggcgcaccaacattgctgaggccaagccgctgtgcagccagcgggcagacgcacccagggccgcagcctccagggcaccagagactttcagcctcccgatggctcccgaggggaaaggcagggacagccatggccgagcacagcttgtgacacccgggcccctgtgctctctgtggcagctgacatgcaggtctgctggtggccgtgtgtccatgcaactgtccaagcccacgcggtcaagctgccgtgccagacgcagaggagaaactagggctgcagtggcggggtcccctcccttgtgaacgtgcgtgaaggtgctcacagcacagcgacagctccgagtgctctgcccctcccaggtcccggggtgcccctcctgtctgtgagggagatgcgggacccactgagtcaggggcagctgctgcctgcaaaggcatcccgtgaaaccacaggaaaccgcaaagctccctccaccgcctgctggacagagccggacggctcctggggaccgggggagggtgtctgtaaggcgaggacatggttggtgcatgctcgtcagggtgtgatcagagaccctccagcctgcagacaccctcgcccagttgtaagggtgagagcacagccccaggcgaggctgctggcctgggaggagggatgagcagcggtctgtggaggaggccttctaaggagtccccctgcacctcacatgctcatcaatacagggcatcctggtaacggaagtttctagatatgggcctctcagcaggaggggtacactggctggtgctcctcttagctgatttcttggttcccaaacggctcccccgctacccacgtgtgccaacagcccccttctactgaggacagcaccccctccaggcaaatcccactcatacccaggacgtgcccacaccccttctcccgtgtggcccacacgcatgccacagggaccaagctggctctgtcggggcagccctcggttttgggggccaagcttcccattcttggaattagtgcaggcatcccccatacaggcctccctccttctgcaatagcttcaatgcctggatgggagccaggccaccctcaggcccagcttcgggccttcctgtgtgtgcagtgggcttgggctgtgtcctgaagaggcccagccacgcggattctcagtggactcttccttcccaaggaaccacgatgaaagacgccacagcccactgacgcacagaggaacccaggctgctctcatggctttgcaccgacctctttcctgggctgaacagtgtccccttaaaaaaagacatgttggtccagacgtggcgcatgcctgtaatctcagcaccgtgggaggccgaggagggaggaccactcgagcccaggagttcgagagcagcccaggcaacacagtgagaccccatctccacagaaaatacaatacaatttagctgaacatggtggtgtgcacctctagtcccagctactttggtgggaagacggcttgagcctgggaggtcaaggctgcagtgagccgtgatcgcgccactgcactccagcctgggtgaccaggcaagaccctctccaaaaaaaaaaaagaaagaaaaggtatatgttggatgctgatccctcatactgtaaacatgaccttacgtggaaacaggacctttgcagatgtagtcaagttgaagtgaagtcattagtgggggaccctgagccaacaccacttctgtttttataaaaaggcaaaatttgcacacgaacgggcacctggagaacgccatgtgacgacggcggcagagactggggccacgtgacgacgggggcagagattggggccacgtgatgacggaggcagagattgggcaatgcccctgcaggccaaggacaccaaagaaggcaacaggcccagaaaacaggacagagtcatcccccagatggggacagactctccttcaccaccatggaaggaaccagccccactgacgccttcacctcggactgcagtcctccagaaccgtgagatgtgagcttctgccatgtcacatagctggcgtgggactctgtcacagcagcccccggatgtcaacacgccctccagctccagcccccagtgagggtggagagtccagggaaatggggctgggggctgggaaaggagttctgagggaagtgcctggggcctgtgacctcctacaggccaagggacaggccacagagatccccagaggtggacggagtcctctgaagaggggacaaccatggcttggctctgacacacccaagaagtctgaggccggaatctgcagatgctctgggggaggacagggtgacactccctgatggtcccccaggtccaggtggcgccccaccagggagggggcaccaggggtggactcaggctctgcagtagaacctggggagaggacaggtcttggcagaaggaagctgttggcaccagctagagtagagcctcttccaggctgggggagccacagggaaaaagctcccacaatggacaggccacgagcgggagagtgaggccgaagccctggcaagcagagagagtgacagcccagtcaccacaggtctccagagaggagacttgtctctcctccccttttcttctccttgcctcccccacacagccccagacagctcacggctgtggctggcaagaccacgcagtgtgtagaaacaccaggctgtgagacagagaagttggatgtgtgtcctgtggccacaaacttagtagcttcgaacaacacgaatggatcatctcatagcagtggaggtccgaagtctgctgtgggtctcacagggctaaaatcaaggcatgggcagggcgggttccttcgggaggctgcaggagagaatctttcctcatctctttcagcttctggaaatggctcgagcccttggttcagggctagcagcaggcatctcactcacacctgccatgaccttctcctctggccaaatgtcctcctccctccttctgataaggaccctgtggagacactgggcccacctggataatccagggtactctcccattagccacaccttatggtccacacatattaagttcccttaattagccacacgtgtgaagtccctgctgccacaaaaggtgacactcataggttctgagaaccaggatgtggacatcattggcgaccatactcagctggccacagaagttcacctctatggactaaggggaaaaaaatcaagcttttaaaaaatgaaagttagtttgcttcagaagtcttactgaggactatagaccgaggcctatatagcccaggagcagtttaggcctcagtaagacttctgaataaaactttcttttttttttttttttttttttgaaacggagtctcactgtgtcgcccaggctggagtgcagtggcgcgatctcggctcactgcaaggtccgcctcccgcgttcacacaattctcctgcctcagcctcccgaatagctgggagtacaggtgcctgccacctctcccggctaattttttgtatttttagtagagacggggtttcactgtgttagccaggatggtctcgatctcctgacctcgtgatccgcccgcctcggcctcccagagtgctgggatgacaggcgtgagccaccgcaccgggccccattctctaaaagtttaatttttttccttagatgaaaatcacagtgacccagataggactcagagtggactgctcagggacgtctggaacactgcggggacccagcaccccggtaccagcacaggccacttgagcccccacggctcctccatggttacaggtgactgagtgactctctcctgagtctctgacctcccacttggttgagagtcctgagttgtattcagttagttcattttacttcttgctgaaggggtacattcttctgtgagactttttatgtcttacgaagggggaattctcctcgttgaaagatactaggtaggaatggcttcatgtgtaacccatacagagtctatacttgcaagtatctttctagaagtaaggggttagctaaaggagattgaacactgaaatggccaaaactgggattctcaaacattaaggcgtgccaggttttctgggactccagttgactacatatcatggcccattcttgtacacatttttaaatagttaaattatatcaaggaaaagtcagaactcagaatcatcaacctgcaaatatagggttaaaatgtagagtcttctggcggggtgtggtggctcacacctgtaatcccagcactttgggaggccgaggcgggtggatcacaaggtcaggagatcaaaaccatcctggctaacacggtgaaaccccgtctctactaaaaatacaaaaaaaattaaccaagcgtggcggcgggcacctgtagtcccagatactcgggaggctgaggcagaagaatggcgtgaacttgggaggtggagcttgcagtgagctgagatcacgccgctgcactccagcctggtgacagagcgagactccatctcaaaaaaaaagaaagataaatgatgctagtccttgccttttcctgaacaagataacgtcttatagggcgagtgatgatgcctctgcggtccataaccagatgtgctcctgcccccaaacccggatgtgattctgctttgatgcagcttctgagccagtttcatgtgatctgcacgtgctgacctcccgccacctgcatatgaactgtgagctgaaacccggggcggagcctctgacagggctgcccccgggctggtgtgagctgaaacacggagccggaatctctgacagagctgcccccggctagaaacctcactcttctatagtcctcggtaaaacttctgagtaaagctcactttaattccttaaaagctttttttatcaacaccacaaacctctttcccatccagttggatgaaggagtagctatagatttaaatttagtttaaggttttaatttcttgacaagagtgggttgcacataccagctaataagcagatggcccgttttacctaaaatggatcaaactacaaaattagtgatttgtcctcaatctcacccagaagagagtaagaactgacctcatacatttaaggaacaaagtgggacgaaggaagcctgatgtgactggggttgggggttcccatcaggccaagctcaggagcacggcccactagcccgagagggtgctgttgagaggccgctcaccaggcctaacattcatctggtacctgccccttctctgcagggaaggagctttccagaatcctggggaaggtacctcctgaggaaggagtgtgggaaagacactgaggagaaggcatcacacagactcaggtgagcactcagcatctggtatttatgatatttgcaagagacctaacatcagacagtgcggagggccctgtggatggcccaggctgtgaacccaggagaaactgtgtagaaaggcgcatggcctcaccggctgggatctagtgacggtgccgcaaaggaggcaggcggtctagtcaggtgacgacagtttgctgtgggaggatgtggggactgcctggcaggagttcagagagcctgctggcttctgacctcgcacctacgagggtcataggaggccacctgctcagcagccagtgggggtgctccaggtgacaggtctatagaccagggtggggcagaagggctggcagcacccagaggttgggcagaaggaagccacacacaaaacaggcttgcagctcacaggcacacagcaggccacctggcaggggctgggcacacagcaggctggctggcagcaggtggataccccacacaggggccggcacagcagagccacacagggggctgagcagcagcaggaggtcccatagccctcgggtgggtagcaggtgctggggacacagcacggggagccagggcaggccattgggcagcccgaagagtggctggtgtggcacatgatggagtgtggacaggtggggggcgcagaggacagggctggtctggagcctgcttccttaggtggcctttatacccaggctaccggcatcctggcaacaagccccctggcatcttcctcgtgggtggtttttcctcctctgccctgtctggttgatctttctgtgtttttctgttgaggttactcagttcaggaaactctttcagctaggggtgccctatcattcagcagaccgtgtgtttcctggaaacagagcaggggtagctggtgaagggctgtcagtgaggccaggggcccacctcatggatgttcaaggtccccccgttgtaaatgccatctggagctcacacaagcacagtcacactcactacaccaggggccccgttttgactgagaagctcagtcatcatcagggtcttcccaagtaacgagagccaaactactgggctctatattgtggaataataatgatgattattgaggtaacagtaatgcacagaggtctagcactgtgccaggctgtgattatctcattcatctttgccagcattcggggtggccgataccccattttacagatgtgcaatttgtaagtcatagagggtttgcacaatgggtgcgtgtctgcaccactgcagaggtgcagggatctggactgcttagtttcactctgggatccatggtcgttaccactgtgccaaattatactagggcttgaaggttcaataagtgactcatcctgaagtcctgaaccagctcggacagagaagatggacgaaaacatcagccacgttggcgtctgcagagcatggctcaggcgtgtgaccacagtgggcttcctgacaccacacctcagaagtgcccacttcccacgagtagcactaatggccacaggacacctcctctgcagacggagcccaggaggacccatcacggagtcgggcatgagctattcatatctggttcctctccctcgctgtgggtctgatcagtctcacccctgcagaggcagcttgggggaaagtgaggagctggtgtgaaattccaggatgcccctgaacttgggaagcagcgggcaggagtgtggatgacacgctcctcctcacactccagctctgttctcttgatggattggccacagcgctttattctacggtggtgtcacacggtgggggatgagccatctctcagggcagagctactctgtccatcccaggcagctcccaggggcaccctctgctcctgtgtgggtccttctgtgcctgctggtggtggatatgggtgattcctgccaagaagccttcagacaagtcagacaccacattaatgaaatcccctccaaggctgaagaccaagtggggtctcagagctgtggacagaacttagaagtctatggacccagagccgatctgtggccatgtgggagtcaccttaaggcctagggacaagccgggcgaggccacaagttcacaggcaactcctttcactgctatagttcagaatcacacttaaaaaccaagagaattggggcagccacagtgattgtgagctagtcaccaagtaatccattttaaaagttggttgtcttacgagtcgattacagaagaacaaggatgcgtctttgatatttatctgctcctttaccttcccctgttcctcctactccttcctgcaggtcagggcccacctggcctcgtcctagtcaacctaaaggacatccgtgcacgtcacctgcagtgcacatctgcaggggaggatttctcccagcttttgctcttctgaacaggtttttacctcaacatgttttgaaggatttttttcataggtatagaattctgggttggcaaattttttttgagcattttaaagaagttgttccattgtcttctggcctccactgtttttgctgagaagtgagggattttctcatccttgcaagaaccttataccttgtatgagaagtgtcttttttttccactgtcttcaataattttttgattttcattactcttactatttgatgcttggatatggttttctttgtgttgatcctcctaaaggttctgagattcttgggtctgtaagttgttattttttaaatcatatttggtgccttgggccattatttttttgaaacttatttatggttcagtatcgctctcttctctttccaaggttcaaactactagtatgttagacagttcagtactgtctcatatgtcttttcatttttctagattctttctcctcttcttgagacaagataatttctactggtgtgtcttcaggttcactgattctttttccatctgactcctaaccccaaatcccagacccccccagcatgggattctgatgcttggttcttgggtcctcatgatctgaccagttcacctgcacccatggcccaacacccagagtacaggattcctgcctcccctggacataccagtttctgaagcagcatcctcactctctccatggccacattgtctcctcacagacgccccccagaccacccaccagcacccccattactatctcctgaacccattttccccagcactcagccctgtatggaattatttcatgcattcatttcttcctttactcatttattcattgcccactgctagaatgctcttgaggccaagacctcgttgctgctggtacacaatatatatttgttgcattaacaaataacttcttgtatagattactctatggcagggttggctaactttctgtaaagggcagacagcaaatattttagcctttgcatgttacagtctcttccataactattcagttgtgccactatagtgcaaaagaagccacagacaacacataaactaatgacatgctgtgatccaataagagttcatttgaaaaacaggcagtgggccaaatgtggctcacagacgatagtttgccaacctatgctttaaagttttactctacaaaattaaagctcaaaatacattattgcctcaacatcttccttgatagcatgaaacaaaagtgaaacaacgggattcggtactttgagtcgagccagtggtgctatgtgcacggtagtagcctgaaaaaaattgacaaaaaacctgcataacgtcaaaccagaacatcctgtttacagaagaaactaacctcaaggccgaagctatttatggtggagcatgacgcgggaaagtacacgcgggaaaataagatgttgggaaacacagtggaaacaaccacaaggaagacaacagttgtgtttttgtgttacccagatgacaggacccaggtataaagaccaccagagaagcagcttccagacatcaccatcctcctccccagtaccagcccagccacacgccaccatgtgccacaccagctgctccccagcctgccagccaacctgctgcatacacagcccctgccaggcatcctgctatgtgcccgtgagctgccagtcctccgtgtgcatgcccgtgagctgcacgcgcattgtgtgcgtggctccctcctgccagccctccgtgtgcgtgcccgtgagctgcaggcccatcatatatgtgactccctcttgccaatcttcggggtgctgccagcccccctgcaccactgccctctgcagacccatctcctgcagcaccccttcctgctgctgaccagctgctcctggtacacgggggtacacacctgtatccctccgtgaataagcatctggtggacccccagattgcacacatagggcagatgaaaagcatgcccaaggaaacctctgaactctggggtgagaacgtggaaaaatgattcagaccttccatgaccctgggaaccccctcaaggaagtcttggctgccagagtccttctctcactccagcaggaaactaaaacccatgtgagccaaataaatcggctgtccctatacacctcgtctctctcttttatcttcatgtatttcgtaagttctttccttgaaggtacataccaacttcaatggcagcagcacctcttcagagagccaccttcctgatggctgagctgaagtggagggtccttggttgggggagtggcctgaaggttctgtcccccgactccctccccaagccttgcactgtggggtaataagatgttgggaaacacagtggaaaccaccatgaggaagacaactcttgcgtttttatgttacccagatgcctgggacccgggtataaagaccaccagagaagaagcttccagatggagcgtgttgggggagggtagaagaaaacaatcctctacccagaaggatggacaagaaatagtcctgggccccagatcccatgcaatacctcaaaggattactgtggcaaagagggcaggaaactctttcaaacaacacccaccacaaatacagagcagagttcgtctaccccgggaggggtagcaggaagtcgaagaaagtctcattctccaagtcccacatgcaaagggcctgcctaagactgacactggaccaggacaacagagagccctcctttctccagctccagcctagcaggcacagctcaataagcaacgtcagcctgcctctggggaaaggcagaagtgtgtagagatctcctctgaacgtcaggcatgcaggggcgtgtgaaacttagggtggagcaaaagcgctgacctccccacccctcatcctaagcacaagcactgatgatacaccctaagcacaagcactgatacaccctaagcacaagcactgatacaccctaagcacaagcactgatacaccctaagcacaagcggttggtgcactgaaggtaaccacagtaacaacaaaacccaaaccacggtcagtgtctgaccagattgactcatccacctccccccacacactaatggcctgacaggaaaagagacgcacgcatttccagaaggaactgatgatgtctgatattcaataaaaaattataagatatgcaaaaaagcaaggaaaaaccaagccattgttgggagacaaagaaatcaataaaactggattcaaaagtgacccaggggctgggcacagttcacccctgtaaccccagcacattgggaggctgaggctggagagtcgtttgagcctggtggttcgaggctgcagtgagctgagattgcaccactgcactccagcctgggtaaaagagcaagacactatctctaaaaacagaaagtagaaagtaaaatcacacaggtgttagagctatcaggtataaactttacaataactataatgaatagattaaaagatcaagagtaaagcattaaaaacataaatgaacagatgggtaatttcagcagagaaatggaaactataagaaaggtcaagtggatatggtaaaaatcaaaatacggtatcacagatggcttccttcagtgggttcatcagtatacttgatacaaccaggtgtggaagctttgaatttgaaaacgtgtaaatgtaaattgaccaaattaaaacacaaagagaaagagaaagagaagggtggagggagacaagagcaaaacatcaaatcctcatttatggatgtaattggagtccctcaaagagaagaaagagagggcagggcagaagaaatatttaaagaggtaatagttgagaaatattctaaaaataatgaaatacataaagtcccatatccaaaaagttcggagaaccccaaattgggtaactatatccccaccacaaatgactagacatgtcacattaaatctgtgactgacaaaaaccaaaggtaaaaagggaaatcttgaaagcatcaatattttaaaagcagactacgagcataaggacaaaggtagagtttacatcagacttctaatcagaaatcacaggaccgaaagtacatctttaaaatactgaaagaaaatccgtcgaccctatgacactaaaagtgtctttcaaaaatgaaagaaaacactttttcagatgaacaaaaactgaaaagacttcattaacagcacacgtgcactataagaaattcttaaaaaatttctttgagccaaggaatatgatagcagagagacacttgaatccacacaaagaaaagaccacctcttggctgggtgccgtgattcatgtctgtaatcccagcactttgggaggccgaggtgggtggatcacctgaggtcaggagtttgaggccagcctggccaacatggtgaaaccccatccctactaaaaatacaaaaatcagccaggcatggtggtgggcccctgtaatcccagctactcaggaggctgaggcaggagaattgcttgaacccgggaggcagaggttgcagtgagccaagatcgcaccactgcactctgtcctgggaacaaaaagaaaagaaagaaaagaagagctctagaaattattttaaaagaagataaatataaataggccgggcgcggtggctcacgcctgtaatcccagcactttgggaggccgaggcaagcagatcgagaccatcctggctaacacggtgaaacccgtctctactaaaaatacaaaaaattagccgggtgtggtggcgggcgcctgtagtcccagctactcgggaggctgcggcaggagaatggcgtgaaccccagaggcggaggcggagcctgcagtgagccgagatcgcgccactgcactccaggctgggtgacacagagtgagactccgtctcaaaaaaaaaaaaaaaaaaaaaagcattataactaattgactgtccagagcaaaaatagtgacagtgcattgtggggtttttaacataagtaaaagtaaaacatggcaacaataacacgaggaatataaaagaggacatggaggtacactgccgtaaagtcctgccacttacagatgaagtggcgtcatattacccggaggtatcctttgttacagtaaaggtatgtattgtaactcttaggccaaataagtttgaaaggacgtattaggctattatcgccttgctataaggaaatacctgagactgggtaatttataaagaaaggaggtttaattggctcacagttctgcaagctgtacaggaagcataatactggcatctgctcagcttctggggaggcagaattgtgaggaaacttacaagcactgtggaaggtgaagggggagcaggcacatcacgtggccagagcaggagcaggagagaaagacggggctgggggaggggccacacgcctttaaacaaccaggtctcccaagaactcactcactgtcgcaaggacagcaccaaggggatgacgcttaaccattcatgagaaatccacccccgtgatccaatcacctcccaccaggccccacctccaacactggagattacaattcaacatgagatttgggcggggacacaaatccaaactatatcaagatgtatacaaaaagtagatataaaagggaataactaagaatactaaaccaaaaagtggcatagaaagagggcaaagataaaaaggaacagatggaacaaatagaatacaattagcaaagtgatattttgctaatattaaattaaatgcaaattaatttattaaattaaattaaatgcaaatcatctaaacaccaaaaccaaaaaacagagatttttaattggattaaataattcaggacccaactatattctatctaccagaagactcacattaaatataaaaaacatagataggttaaaagtaaacagatggaaaaatacaccacacaaacattaatcaagtaaaattggaatggctatattaatatcaaagtcaacttcacaaaagaaatattaccaaggataaaaaggaatattacataatgataaagcatcaattcaccatggacacgtaacaattctaaatgtgtaagcaccaaacagccaactttccaaacacatgcaacaaaaaaactgagaagggaaaggaaaaacagataaatcagatttgtcattggacttcagcttcaagagaacaagtagacagaaaatcaggaaggatacagaaggcctggacaacactgtcaatcaacttgacctaatggatattgacagaacactccacccaacaataacagatacacattcttttcaagcacatgaaacattcaccaaaaagactatattgtgccataaaataaacttcaacccatgtaaaaaagttgaactaatacaatgtatgttctctgaccacaaagaaattcaattagacattaacaccaaaaggatagcgagaaacaccctgcagaactgtaaagtaaccgacacacttctaaataacccatggttcaaagaagaatcacaagagaatttagaaaatattttgaattaaatacaaattaaaagacaacatgtcaaaatatatggaacatggctaaaatagtgtttagagggataaaattatatcattaagtgcttatattcacaaagaagaaagtcctgaaatcaattatctaagtttgcactttaaagaaaaaaagaaaattaaactcaaaattagcaaaagaaatgaaataattaaaaatctgaaaaaaaaaatgaagtagaaaatggaaaagaattcaatgaaagcaaaagctgcttctttgaaaagaacaatgaaatgaataagcatctagccagactgagcggtaaaattataataaaaagaaaaaaaaagacacaaaatagcaatattaggagtgaagaagagacatcattacaaatcttacaattattaaaaacatgatacaggaatgatgtaaacaacttcataccattaaatttgataacatacataaaactggcacatttttaaaagacaaaagtatgaaagcttattccagagaagtaggtagcctgaatagtatcatatctattaaagaagttgaattttcagttaaaatctttcaacaaataaaactaggggcaaatggcctccctggaaaattctaccaaacatttaaagaggaaatataaccaattctacatgaactcttccagaaaatagaaggaaaggaatcattcccgattaaattcatagagccagcataatcttgatatcaaatttgaacaaaagtattatagtacatagtatatagaaaactatatactattaataatatctcttatgaatatagatgcaaaattctcaaccaaatactagcaaattaaatccagaaatatgtaaaagagataaaaggtcgtgatcatgtgagatttatcccaagaatgcaaggttggttcagtgttaaaaaatcaacttataattcaccatatcaacagactaaagaggaagcaccatattattatctcaatagattcagaaaaggcttttgacaaaattcaacatccattcagaataaaaactgctagcaaactagaaattaaaaggaacttcttttaaagagcatctatgaaaaacctatagctaatatcatacttaatgatgaaagactatatgctttccccttaaaatcaacaacaaagcaagaacattcacttttgcctctgctatttattaccatactggacttcctaaacagtgaagtaaaaagcatgcagcctggaaagaaagaaataacacagtctctattaacatattacattattgtctacctagaaaatccccaaaattctacaataaagctacaagaactagtaagtgaatttaacaaggtcaaagaaaaaatgccaatatacaaaaatcgattttattttaatatactagcaatgaacaatcagaaattgaaacttaaaaatagtaccataatagcattaaacttataaaatacttagggataaattctgggggaaatatataaaatgtatacattgaaaactacaaaatattgatgagaagaatcagagaaaacctaaataaatagaccatgttatggattgctggatatgtcgactctccccaaattgatctatatagtttcaatacactcccaatcaaaatctcagcacaaattctgtagatattgataagcttattcaaatatctatatggaaagacaaagaaactagagtagcctaaacaacttcttaaaagaagaacaaaattggagaactcacactagctgatttcaagacctactataaagctgcatttatcagggcaggatggtgttggcaaaaagatacttagcatatgacccagctattccactcctagacatttacccaagagaaagaaacaaatacgtccatgcaaaaacctggacttgctaacaaatgccccatgtggagcactagcatcacagaacttgggctccaagtggccctgagggccacagctccagagggcgggggctgagccaggcctcatccatgcttctctgtgcacagggcaggtaggttctccagaagcattttttggttaccaaccctccctcctctcatgctctgatttccagtttgacctctaactcccagcctgggggaccagagtgcttacgtgtgtgcataagtgtgtgcacgttgtatagtgcacacattgggtgtgttcatggattcgaatgtgttcggctgcaagcatttatatgtctgggttgattggttccatttctcactcagttttatccaaagcctcccagtttaaactacacaataggtccctgaccaccttgcctaaaagatgatgaaaccagttttttaaccctaaactcaacacttgcctccaaggcaaataaaaatcttggaatcgaaggcagccagtagtgagaacgttcttcaggggacagttctgggctatgctatctggaatagcagactcctggggcaagagggctggcccatctactggggaacgtttaacctgagacagtcacagcagagccccccaggaggggaatacagcccagacaggggaaatgcagaagaatgctaccagcacaacgcagactgggaaaagcaagttccagattacattctgaataatttccttttcatatcaccagaaattactaaattagaaaacacccatttcaggaatacatagagatatgactcaactctattttttctagaaagtaacagaataaggagcacacaatcccaacagtggctgccccaagaagttcttggtaaattattgatgatgttctcatttctatgtcaggcagtgggttcatgcgggtttattatattaggatcctcagtaattgatcatcagtcaatcaataaaaaccaagcctttgtggaccagtgatgggagtgtgtgccgcagaactaatccagttctgtaaacttgagatcctccgcgacctgggaaacaggacgtccaccaaccacatcagaaaacccaattgtcaatgctctgaggctttggccatcagtgcagggcttgttggcctggagcaggagtggacagccagtggggaagcgagaccactctaccacaggcgggtaagtcacttctgtggccactgcacctgggccccaggagccctgggagagaccacatgggcatctgcagctgcgccctccacccgggacaccaccttctgatgagcactgggtgaagggatcactgaagagggtttagcagcaaattctatgtaatcagcagaatagatagcagggagtatggaaataaaaaagaaagaccagaaatgcagagctgcatggggaaagctggtttatttggctctcatggggtcagagaatgactctgggaccccagacttccctggggggatgggcaaggtcagcaagggctccagatcattctgtcacattctcaatccagaattcagagggttcaactgagcatgcttttcacctgcaccatgtgcagaagaccaactgaggactcatccagggagtgtacaggtgtggcctcatctgcactgggagcagcgggtctggagattcatgctcagcagcaggaagagatactgtaggagatgggtctgcagaggacgctggtgcaggagggctggcagcacccagaggactggcaggacggagccgcatacacgacaggcctgcagctcacaggcacgcacagggaggactggcaggagggggctgcacacacaatgggcctgcagctcacaggcacacacacagaagactggcagctcacgggcacgcacacagctgacttgaagctcatgggcacacacacagaagactggcagctcacgggcaggcacacggctggcttgaagctcacgggcacacacacggaggactggcagcccacaggcacacagcaggatgcctggcaggagctgggcacacaacaggctggctggcaggggctgggcgcgcagcaggctggctggcagcccgaggagcagctggtatgacacatggtggcgtgtggctggataaggtcgaggcagagggcagtgatgtctggggacggcctccctgggcagcctttatacctgggcccaggcatccccacagcacagaagcacacctgtcttccttgtttttcttcctcagtgctgtctcctggagcttaattttctgttgtaggtgtctctgggttttgtttggcccttagcttcatgactaattgcaccttcttcgaactcttggtatgcttggaaacctgccagagtgttttactggcttcatcaagattcttccttgttctttaaaattttacctgagttacttttgtgagattccaaaaactcagatctccagatttttttcctctctgtgtgatgatggtccttaaaccacagaagtttacactcctctcatggctcaggaaggctccacagtcaatgtgaggtagaacaggacgtgtctagctgatctgtgggtgtcctgagagcttagagctggatgagagctagcagatggaggaagaacatggaaatcacttgtccataggatgagtggggacaaagggtgtgggtcacagagaacttcttgtgagtggtgaccatggatctttgtcttgagaaatcctcctagttaagaaccaagatgagacaacaccactggccctcatgcatggagacacagctctaaggaaatcaagctggtccaagcatgttcccagggaagcatgtgaggccagtgaagggtcccatggacagccacagcaggatatgtgtgagctgaatatagaaggttccaagggccagaatgacttctgggtatgttcagcagaaagccatgtgcaccctgtactgcagggacagtagaatctctgagcctacagatgtcaacaccagatcacttggaacttggcatcatgataacagaatgaaggaaaaaaccacgtgatcatctcaattgatatagaaaaggcatttcacaaaattcaagattctttcatgatgacaacaatcaacaaactaagaatagaagaaaactacctcaacacaatacaagccatacatgaaagacccacagcaagcctcatacccactggtgaaaaactgaaggctttttctctaatattgggaacaaagccagcatagtactagaagttttactaagagcaactaggcaattgtttttaaaaggaagaaagaaagaaacaaaaagcatccaaattgaaaagcaagaagtaaagttagctgtgttcacagatgacatgatttttatatgtagaaaactctaaatattccacacacaaaaattttagaataaatgaattcagcaaagtagcaggatacaaaagcaaaacacaaaaatcagttctatttccataaactaacaagcataatctcaaaaggaaagtacaataacaattccatttacaatacattaaaaagaacaaaatactcaggagttaaccaaagaattaaaataattgtgtaacaaaaactacaaaacgttgaaagaaattaaaggcaacagaaataaatggaaacacatcccatgttcatgaattggaaattaatattgttaatatgtccatactaaccaaagcaatctacagattcaatgcaatccctgtcaaaatcccaaggacatttcttgcagaaatagaaaaacccatcctaaagtttatgtggagtctcaagggaccctaaatagccaaatcaatcttaagaaaagaatagagctggaggagtcacactttctgatttcaaaacttactacaaagctacactaatcaaaactgtggtactggcataaagaccaatatatagactaatggaatagcatagagagcccagaaataaactctcacaactacagtcaaataattttcggcaaggctgtcaagacctttcagtgagggaagaacagactttttaacaaatggcagtgggaaaacaggatatccacacacaaaagattatttttaacccttacctcacaccatatacaaaattaactcaagatcaaagatagagaatctcagtagggaaattgaaactattttttaaatgggaatgctagaactaaaatgtacaatagctgatattttaaaatccacatgatagacgtaaatatagaatgagattgaagaagagttcatgaacttgaagcacatcaatagaaattatccaaaatgaaggagaggaagaaaaagaattaagaaaaatgaaaagagcctgtgagacatcattaaacagcatcacatatatgtaatatcaaactcaggtggctcacgcctgtaatcccagcactttgggagggcaaggcggctggatcatgaggtcaagagatcgagaccatcctggctaacatggtgcaaccccgcctctactaaaaatacaaaaattagctgggtgtggtggcacgtgcctgtagtcccagctacttgggaggctgaggcaggagaatcacttgaacccgggaggtggagtttgcagtgaggtgagattgcaccactgcactccagcctgtgacagagcaggactccatctcaaaaaaaattaaataaaaaaataaagcactgggcattctcccctaaaacacaaagctacaaacacagagcctcctccacccctcagcatcaagggggcaagggtgaggggttggagggctgtactttcagttaaagagaggctagctgtgtgcctgcagtatggactaaggagcctggagcctggactgaggctgccaggctgaaaaccgagaccatgacatcaggttccagcacactccattgctactggcaacagccatcccagtattcccaccattctcctcctcggcttacggatcacccgcaggaggtggcgtgccttgttgggatgaacatccggatgccctttgccccagcagtcccacccccagaggtcctacccccagaacactaacaaacaaattgtggaataggtttgcaaatgtttatatcagcaccatctgtaatagcagactcttgggaacaacaggcctgcccatctactggggggcatttaacctgaagtagaaacagcagaaccccaggaaggaggcacgctgaatacagaatacacccacaagaaatgcagaggacccttagcaactctgtacagagtgggagacataagtctcagaagattactcagaataattcccttttaatatcattcaaaaccactaaattagaaaacacacatttcaggaatacaaagagatatgactcaactctattttttctagaaagtaacagaataaagggcacataatcccaacagtggctgccccaagaagttcatggtaaattattgatgatgttctagtttctgtgtcaggtagtgggttcatggttcataggtgggggggttgttataatcattaataattgatcaatcagtaaaaagtgggcaggctcaagagggctgactagaggcacctgacacttgcctcttccacaaagaacccaaaagagtgagaggtaacaacattttgaatgggacatctgagagagacactggaattcagcaaagaagcaactggaattcagcaaagaagcgacaggaaatatctgaggcacagaaggcaagggaagggaggcagctggcccagctagaatcagtcgggagcccacagagactccccagtccagggaaatggtaaatgagagattcccagctgtctacatttccaccatggattcagcatggacctgaaaccctagccatgggagagcctcttattcttcacatgccctgagacttacatagggatttgccaggatgccacataatggcattgctccagagaaagagcccacactgggtctcacacacccaccaggtcctgagcagctgtagcatggtgccattttgagagcccagcccctaaaagtctgcatcctgccctggggcccaacagatcttgtatctccacatcccttcagctctgccgaatcccacaacccccaccaacccaagagggctgcaggagtgcaataccagctggatgcatcaataaggcaggggttcatgaacttgcatgtaccctgagtacaggctttccccacccaccatcataaattaccccacactattcaccatagcctgtgtccatgcacactgtgtggcctggcactgcaccctcagtgcccaagcataccatctgggggcctggtggtcccccccaacccattctaccaatgccagccatctatgcactcctcccagggacctgaggatgtgcccacccagcatgccactaccaccagcgctcacttgcatgtgccacctgggagcttggggactggcttgcccagcctgtcacaaccaccacttatattaggaagtgctgtctgagagcccaaaggctgtcccaccattgctactaccatcatccatgtcaggcacactgcccagcggcccaaggacccatccatgcatccaacccactgctgccactgctagcacataagcaagctgtctggaggcccaagaatcagcctgcctggacatggtaacaccagtgccagcatatgctactcaggggcctaaggacaggcacatttggcccactgctgccaccactggggcctgagatttggccaacctggtgtttctgaccccagaaaagcctcaccacagcctccactgacaaccacagccaagctgctgaggaaatcacaaacactagtgatgctgttcacagccaaagaaatcatacagagactaaactactgcatgcacccagaatcatagctaaagtattccaaccagccaccgccatagacacatctgcaggaaaaagtcttctcataaaaaagccagtccccaaaattggaagaagtgattgttatgtcagatgtgcagatatcaatataaggactcaagaaacatgaaaaaacaaggaaatgtcacacctccaaagggacacaagaattgtgcaacagattcaaatgaaaaagaaatgtatgaattaccagaaaaataattcaaaataatgatattaaggatattctgtgagatataagataacatggataaactatacaaataaaccagaaaaacagttcaggatatgaatgagaaaatcaccaaagagacagatatcataaccaaagaatccaacagaaatcctggaaatgaataattcaatacatgaaataaaaaatccatttgagagcttcaacaatataccagatcaagcagaagaaaaaatttcagaagttgaagactggtcttttgaaacaactcagtcagacaaaaagaaaaaaagaagaataaacaaagcctatgtaacatatggaacactataaagtgagcaaatattctaatattggatgttccagaaaacaaagagaagcccaaaggcatagaaagcctatttagcaaaataggccaggcacagtggctcacgcctgtaatcccagcactttgggaggctaaggcgggcggatcacaaggtcaggagattgagaccatcctggctaacacggtgaaaccccgtctctactaaaaatacaaaaaattagccgggcgtggtggcaggtgcctgtagtcccagctactcgggaggctgagacaggaaaatggcgtgaacctgggaggcggagcttgcagtgagcagagatggcgccactgcactgcaggctgggcgatagagcaaaactccgtctcaaaacaaaaaaaaaagaaaacctatttagcaaaatgataggtgaaaatttccctagtctagcaagagatttaaacattcagatgcaggaagctcagagatcctgatatggtttggatttctatctctgcccaaatctcgtgttgaattgttatcctcaatgctggagaaggggctgagggggaggggattggatcatgggggcagatttcccccttgcagttctcctgatagtgagttctcacgagatctggttgtttaaatatgtgtagcacctcccccttttctctcttcctcctgctccagccatgtaggacattccagcttcccatttgccttttgcattaattataagtttcctgaggcttcccaacccacgctccttgtacagcctgcagaaccatgagccaattaatcctcttttctttataaattacccagtctcaggtagttctttatagcaatgcaagaacgtactaatacagatccccaaatagatacaattcaaaaagatcttttccatggcacattatagtcaaactgtcaaaagtcaaagacaaggagagaattctaaaaatagcaagaagaaagcaactagtcatatataaggaaacccccatcagactaacagtggatttctcagcagaaaccttacaggtcaggacagaatgggatgatatattcaaagtgctgaaagaaagaaactgacagacaaggatactatactcagcaaaattatcctccataaataaacagaaataaaatctttcatggacaatcaaaagctgagggtattcatcaccactggaccagccatacaggaaattcttaagagaatattacaattctaaatctatatgcacccaataccaaaagagtctgatatacaagcaaatattattagatctaaaggaagagacagactccaatacaataatagttgaggacttcaacaccccactctcaccattagacatatcatccagacagaaaatcaacaacaacaaaaaaattggatttatactgaactttaaagcaaatggacctaataggcatttaaagaacatttcatctaacagctgcagaatacacattcttctcataagcacatggaacattattcaggacagaccctatgtttggccacaaaacaagtctcaactaactttaaaaaatcaaaataatatcaagtatcttctcagaccacaataactaaaactagatattaataacaagaagagctttggaaactgtacaaatatgtggaaattgaacaacatgttcctaaatggctactgggttaatgaagacattaataaggaaatcaaaaaatttctcaaaaaaaaataaaaagggaaacacgacatatcaaaacctataggctacaaaaataacagtgctaagagggacgttagtagtaataaatgcctacatcaaaaaggtagatgtggtggtgcctatagtcccagctgctagggaggttgaggtgagatgatcacttgagcccaggagtttaaggccagtctgagcaacacagtaagactccatctcaaaaaaaaaaaaagtagaaagatttcaaataaacaatccaatgatgcacctcaaggaactagaaaggcaagaacaaaccaaatccaaaattagtagaaggaaagagacaataaagtatatagctaaacaaaatagactttaaaaaaatacaaagaagtaacaaaacaaaaagttggtcttttaaaaagataaaaaaaaatcaataaacagctagctaggctaaccaagcaaaaaagaaagaagaccccaatacacaaaatcagaaatgaaaaaggagacattacaactgataccatggaaatacaaaagatcatctggctgggcacggtgactcatgtctgtaatcctagcactttgggaggccaaggcaggtggatcacttgagcccaagagtttgagaccagcccgggcaacatggcaaacacccaactctataaaaaatacaaaaattagctagttatggtggcacatgcctgtagtctcagatgctgagaaggctgaggtgggaagatcacctgagcccaggaggtggaggctgtggtgagccatgaccacaccacgactgggtcattgcactccagcctgggtgacaaagggagactctgtctttaaagtgtgtgtgtgtgtgtgtgtgtgtgtgtgtgtgtgtgtgtgtgtgtgtgtgtgtataacattaccagagactatgctctaaaaactggtaaacctagaggaaatgataatttcctggacatacacaacctaccaagattgaattaaaaaaaaaaagaaaacctgaatagaccaataatgaataaccagattgaatcagtaataaaaagtctcccagcaaagaagagcccaggcctgaatggcttcactgccaaattataccaaacacatgaagaaccaacactaattctcctcaaattgttccaaaaaattgaagaggagggaactcttcttaactcactctatgaggccagaattaccttgataccgaaagcagacaaaaatacagtaaaaaaagaaaagtacagaccaatatccccaatgaacatagatgcaaaactcctcaacaaaatactagcaaactgaatccagcagcccatcgaaaagataatataccatgatcaagtggaaattatcatacagatgcaagggtgattcaacatacacaaatcaataaacatgatatatcacattaacagaatgaaggacagaaagtatatgagcatctcaatagatgcagaaaaagcatttgacaaaattcaatatccttcatgataaaaactctcaacaaaccatgtacagaagaaacatacctcaaaataataaaggccatgtatgacagacccacagctaacatcatattaaatggaaaaaagctgaaagcctttcttgtaagaactgaatgagacaaggatgcatttttttttttcagttttcatcttgtttattcagtttgctccgagggcaaaatcaacagtagtagagatcacaaacattattttgattggcctcacaagtctgatcagtaaaatccgaaaaacagaaaatgttacacgagttgcaaagaaagcactcctggagttcactgacatgatagcaagtggaaagaatataaatgcaacaggtgttaacatttagaacagtacttgtaagcctgctcatgtctagacaattctgggacccttgcggcaaacccttcatgtatcactgctgatttccttgacatgaaatacgactttacgaaaatcttcctagaccttactctggctgtacttgagtggttcttgtgcctacggcgctggcatatgctgtcaggatttccattatctgtttcgtttctagggttattcgggcttccttcagccagtcttgtgccacttatctggattctcccttcagctgattgacaaattttgctactagctccagatcaccatgctcaatgcaataggaggcatatgacagtaatttaaacgtgtttatatcttcagatcagagctctgcagcttcagttgctgaggcgggaatagaagcagggactgcaggtaggagaagaagtactggtacaagctatttctggtttaatcaatcattgctacccttcgggccagtttttgaacagcataaaagcggactctaagggtctcttcactgtacaccccatgggtcagggactctggagggatagctgtggctaaagctttagtaaattcattatcagaacagttggctttgatggcctcaactgcactacccagtgggacagcaggcatttctgcagatgaggtcttcatgctgtactttaatgcctccactgaaagccagagttggtaggcttttctggcttcctcttcagcaactgcatgactctgaacagcgtgttcgattcctctgagtctggcataggcggtatttatatccagagtaaagttgtgaacttgctcttgacttagatgatgaaactgtaattcttgttccgagagtttctcagacaggttctgctcaaattcatacttcaattcctgttcttgaaccctaaggacatctcacaagtgatcagtgtgggcagctgcctgtcagtgaagctaggttctcatttcattctccatggcatctctgacttcctctacgtttctgtcctattcagcctgcattttacttccatgatgttctaatgcttttgctactacagagtcaaatgcccacttttcttccagcgtttgtttctccaaggctaatgtgatgtgctgcttttctgtggccttctgttctgctagctctctgttcagctgatcgatgtgacgatgtgcacgggcaatcagggagttcagatcatcagtagagagcttgtcagctgggtccgaaacgctcattcctttccacccaggaaggacttctggagtaatactgtccagctgtcgtttaaagtcatcctgagcttggcccaccagctcatgatactgagatacaagcttagactcaaattgagctgcttggacctttttgaccacattatccagatcaactatcatgttgtgaagtttatatgaggcttggccccagcaacctcttctttctttgcattttcagtcacacttttcatcttctctacctcttctttggctttgagaagggcattggcagcttcatctactgcctttctgtgttccttcaacgcaccttgcactgtgtgccacttagcagacttcttcttgccctcaatctcagaattgtccatggcggctttcaatatgttggagtgtgcattgacagcctggaccacagtgttctgagctgcaatcgcctgcagagtgacatttgcagtttgcctcagagcatcttcaaagctcttggctagagactcagttttaacttgttcttgtttttcctcttgtgcaaggcaagctgcaatttcttcacatggtcgttcccttatagaagatgaggatgcttcttctgaaagtgcaggtgtgggttttccttcatcaattgcagggtgatcagtttttaaagattcctcatgctgaaccccagggaccaacactgtatcacctgcggttgctgaagctggagtatctcccttttgtttttggagttgtgaggcaggctgtttaaattcttttgttacttctgatacactagagatttttagtggaccagactgagttgatttctttggcaatggaacattataaggtgcagaaccaagaaccacctcgaagagtttgtctgagtaaggtatggttttctctactctttctcggaaatgggaagcccatttggcatataggatagtgccaccaatacctccaccaaaaaacaaaaggccagctccagcaatgttgccagtagtcaaccacagagctgcctgaagtagagtatcggcggcatggtcacagtggacggaggactaacttcccatagagacaactctgggccacagcggtcacactcgataactgacaggcccgcagtatctgtcgagcggacggtgctgctggtggatgcgggagctgccatggcggcacgagtaagtggaggcatgtgtacatatgtcaaggatgcctatttttatcactcctattgatatggtttggatctgtgtccccacccaaacttgaaatgtaatccccagcgctggaggtggagcctggtaggaggtgatttgatcatgagggccatttctcatgaatggtttaacaccatccctcttggtggtattgtcatgataatcagttcttgtgagatctggttgtttaaaagtgtgtggcatcctcaccccacccacactgctccagaatgtgaagcactggtgccccttttgccttctgccatgactgtaagcttcctgaggcctccctagaagcagaagcctctatggttcctgtatagcctgcagaaccataagccaattaaacctcttttctttataaattacccagtctcaggtatctttatagcaatgtaagaatggactaatacacctattcaacatagtactggaagtccaatccagtgtaatcaggtaagagatagaaataaaagctgtcccaattggaagagaggaagtcaaattgtccctctttgcacatgacatgattttatatttagaaaaatctaaagactccaccaaaaaactattagaactgataaacaaatttagtaaagttgcaggatacaaaatcaacatataaaaatcagtagtgtttcgatacaccaataacaaactagctgaaaaagtaagcaaaaaggcaatccatgaaggctaaaacaactccatcttggatgctaatctgccatatggacttctagttaacctgttctgggaaggcctctaaaatttccagtttatctactgttccttgtataagagcacatactataaatcctgcttcaaaacaaccttgacgttatcctacttcaattggtctacagagcccttctaaatcacatataccctttccttatggtatataagccttgggtctggaggggtaatggcacagggatccaccagcttatcttaccaccacccaagacacagacatggcttctgttttaagtccttattaaatgtttctttctgagaaactggatttgtcagcctctttctgtggcctctcagcttccttgaactttgggggtaggtttgcatagacctgcccatggaacacaatctcattcacaatagctattttaaaaataaaatacctggcaataaatataaccaaggatgtgaaagacctctgcaaagaaaactacaaaacactgataaaataaattgaagaagacacaaacaaatggaaagacattccatgttcatggatcagaagaaatgatattgttagaaagatcatactatccaaagcaatcaacagactcaatgcaatctctatcaaaatgccaatgacatgtttcacagaagtagaaaaaacagtcctaaaattcatatggaaccaaaaaggaccctgaatagccaaagttatcctgaacaaaaagaacaaacctgtaggtatcacaccgcttgacttcaaaatatattacaaggctaaacagcatagtattggtataaaaccagacacatagatcaatggaacagaatagagaacccagaaataaatccatatatttacagccaattgattttcaacaaaggtgccaagaacatacaatagagaaaggacaccccttcaataaatggtgctgggaaaactggatagccacatgcagaagaatgaaactggatccctacctctcatcatatacagaaatcaactcaagatgtatcaaagccttaaacataagaccgaaaaccataaagctactagaagaaaacataaatgaaatgctccaggacattggtctaggcaaacagtttatggctaagactacaaaaacacaggcaacaaaaaccaaaatagacaaatgagattatattaaactgaaaagctctgcacagcaaacggaacaatcaacagagtgaagagacaacctgtgtaatgggagaaaatatttgtaaactatgcatctgacaagtgactaatatccagaatatgtaaggaactcaaacaactcaacaacaacaacaaaacaaataattccattaataaatgggcaaagcacctgaataggcatctctcaaaagaagacatacaaatggccaacaggtatattaaaaaaaactcaacatcactaatcatcagggaacttcagatcaaaactacaatgagatagcatcatcttaccccaattagaatggctattatcaaaaagacaaaaaataacagatgctggtaaagatgtggagaaaagggaactcttatacatcatttgtggaagtgtaaattagtacagccattatcaaaaacggtatacagatttctcagaaaactaaaataaaactaccatactatccagcaatcctgctactatttattcaaaggatagggaattggtgtatcaaaaagatacctgcacccccatgtttattgcagcactattcacaatagccaagatacagattcaacctaaatgtctatcaataaataaatgaatcaagaaactgtggtatatatttacaatggaatcttattcggccataaaaaagaatgaagtcctgccatttgcagcaacatggatggaaccgaaggtcattaaagacaaatattacatgttctcactcacatgtgggagttcacaaagttgatctcatggaagtagagagtagaatgatattaccagaggtgaagaacggtgtgtgttagaggagaagtgagtttggttaatgggtacaaacatacagttacacagaaagaataagttctaatatttgatagcagcatagggtgactacagttaacaatgtattgtatgtctcaaatcagctagaagagagagtgtaaaatgtcctcaacacagagaaatgatagacaaggtgatgaatatcctgatttcatcattacgtatcctctgtgtgtaaagtatttcatatgccccataaatatgtaaacatattatgtatcaatttttaaaaagtgccatatgtagatcagtgatgggagtgtgtgctgcagaactaatccagttctgtaaacctgagatcctccgcgacccgggaagcaggacatccaccaaccacatgggaaagcccgatcctcagtgctctgaggctttggccatcaatgcagggcttgctggcctggagcaggagtggacagccagtggggaagcgaggccactccaccacaggcgggtaagtcaccgctgtggccactgcagctgggccccaggagccctgggagagaccacatgggcatctgcagccgcgccctccacccgggacaccaccttctgatgagcactgggtgaagggatcactgaagagggtttagcagcaaattctatgtaatcagcagaatagatagcggggagtatagaaataaaaaagagagacaagaaacgcagagttgcatggggaaagctggtttatttgactctcatggggtcagagaatgactctgggaccccagacttccctggggggataggcaagttcagccagggctccagatcattctattatattctcgatccagaattcagagggttcactgagcatgcttttcacctgcaccatgtgcagaagaccaactgaggactcatccagggagtgtacaggtgtggcctcatctgcactgggagcagcgggtctggagattcatgctcagcagcaggaaggggtgctgcaggagatgggtctgcagaggacgctggtgcaggaaggctggcagcacccagaggactggcaggagggagccgcatacacgacgggcctgcagctcacgggcacgcacacagaggactggcatctcacgggcacacacacggctggcttgaagctcacgggcacgcacacggaggactggcagcccacggggatgtaacaggatgcctggcaggggctgggcgcgcagcaggctggctggcagcccgaggagcagctggtgtggcacatggtggcgtgtggctggataaggtcgaggcagagggcagtgatgtctggggatggcctccctgggtagcctttatacctggacccaggcatccccacagcacagaagcacacacctgttgtcttccttgtttttcttcctcaaggctgtttcctggaactcagttttctgtcgtagatgatgttttttatctggccctttgtttcgtgactaattgcaccctcttcaagctcttgttacatttggaaacctgcccaaatttatcagtgatgcacaggcagttttagctccacctgcctgatatctgcctcccttcgttagttctacgctgaagcagacatgagtggtacccaaaagagctcctcgaaccgcaacttctgttgcatcaaccagaaactttggggaagagaccagaactgaatatagacaatgaaatcatactggggaacctgctggagtgagtgatgcaaagctggctactctatcaactatacagttgagatttaggagatgctcgttttcaggcagccgtcaaccagcagtgcagactgtgcttcctgagagagaagaaacttaggagataaactcccatttcccagctctctgctggggcaggcttccaaaatgcagtgtcaccttccaaaatgcagtgtcaccagccggagtcagagcagaatacagtgacccaactctgccgaggaggaaggggccagcgctcaagcagctgaagccctggagtccgaggagcagagaagcggaaagaaggatccgtgtggagagcaggccccacactgtggaagctgactgtgaatctgtggaacggggcagggctgtgcattcccagggcaaggcaaccacaggctcaccagagagaagctgctagaggattgagagtgaagcccccctccagtccccacgtcgacatccagccgagaccccctacagcccggcaccaaatgagtaaggaccacagactacagtgagacccgcctaggccagcccgaacaaagcctaaaccaattcagaataggatttttagggaagacagtttggaatgtgagtcccaccaagatacagagtgttccaagttgtagatgcttcccagagatccaccctagcaaagtgttgaacaaaaactgcacaagattaaggtcattctccagtaactgacggctagaacaaaaatcagaaacatgatacagctcagagtctgtaaatgcattattatgatacctcatacacaatcaaaatcatcagatattgaccaggcacggttgtttatgcctgtaatcccagcactttgggagaccaagatgggaagattgcttgaggctaggagtttcagaccagcctgggcaacatagtgagactctgtctctacaaaaaaatggttaaaaattagccagacatggtggtgcatgcttgtggtcccagctacacggtaggttgaggcaggagggtctattgagcctgggaggttgaggatgccatgagttatgatcacaccactgcattccagccagggcaacagagcaagaccccgtctcaaaaaacaaatcatcagatattaaaagatataggtaaatttaattcactgttaaaaaaaataaacctgatatggtctagatattggacatggcaaatgatgactgtaagcagctattatagacatcttccaaaaaatccaagaaaactgttcaaataattaaaggaaaacattgtcttcatgaatggataaatagggaatctcagtagagtaattgaagctattttttaaaatgggaatcctagaactgaaaagtacagtagttagaaattttaaatacaccaaatttgacttcaaaaatcaacaacgtccaaatccaggaatctcagaaagcccccagtaggataaataggaagaaaaccacatccaggcacatcatgaagtgatgaaaaccaaaaatgaagacaaaatctcaaaagcagtgacaggaagacactttacatacaaaggaacaaggataagaaaaacgccctggcttctcatgagaaacagtggagacacatctttaaaatgctgagcaacaataactggcaatccggaagtctacatctatgaagaacgtgcttaaagactgagactgaggccgggccgggcactgtggttcacacctctaatcccagcactttgaaggctgaggcaagaggatcacttgagcccaagagttgtagaccagcctaggcaacaagcaagagcacatctctacagaaaatttaaaaattagctaggggtggcggtgtgcacctgtagtcccaactattcaggaggatgaggcaggaggatagcttgagcccaggagttcgaagctgcagtgagctatgactgcaccatcacacttcagcctgggtgaccaagcaagaagggtctcaaaaaaccccagaaactgagattgaagtgaaaatctgttcagaggaacaaaagctgggagaaatcctcccctgcagatgtgcgctgcaggcaacgtggacagatgtgctttaggttgactaggacgaggccaggtgggccctgacctgcaggaaggagtaagggccaggcaacgtgcacggatgtgctttaggttgactaggacgaggccaggtgggccctgacctacaggaaggagatgggggaaggtaaaggagcaggtaaatatcaaagatgcatcctcattcttctgtagtcaacttgtaagacagctaacctttaaaatggattacttggtgactaggtcacataggaacatgtgatcactgtggctgccccaattctcttggtttttaagtgtgattctgaactatagcagtgaaaggagttgcctgtgacagggctgaacttgtggcctcgcccggcttgtccctaggccttaaggtcactctcacatggccacagatcggctctgggtccatagacttctaagttctgtccacagctctgagaccccacttggtcttcagccttggaggggatttcattaacatggtgtctgacttgtctgaaggcttcttggcaggaatcacccatatccaccaccagcaggcacaggaggacccacacaggagcagagggtgcccctgggagctgcctgggatggagggagtagctctgccgtgagagatggctcatacccctactgtgtgacaccaccgtagaataaagcgctgtggccaatccatcgagagaacagagctggagtgtgaggaggagcgtgccatccacactcctgcccgctgcttcccaagttcaggggcatcctggaatttcacaccagctcctcactttcccccaagctgcctctgcaggggtgagactgaccagacccacagcgagggagaggaaccagacatgagtagctcaggccctcctctgtgatgggtcctcctgggctccgtctgcagaggaggtgtcctgtggccattagtgctactcgtgggaagtgggcacttctgaggtgtggtgtcaggaagcccactgtggtcacacgcctgagccatgctctgcagacgccaacgtggctgatgttttcatccatcttctctgtcccagctggttcaggacttcaggatgagtcacttattgaaccctctacccccggtataatttggcacagtggtaatgaccatggatcccagagtgaaactaagcagtccagatccctgcacctctgcagtggtgcagacacgcacccattgtgcaaaccctctatgacttacaaattgcacatctgtaaaatggggtatcagccaccccgaatgctggcaaagatcaatgagataatcacaacctggcacagtgttagacctctgtgcattactgttacctcaataatcatcattattattccacaatatggagcccagtagcttggctctcattacttgggaagaccctgatgatgactgagcttctcagtcaaaacggggcccctggtgcagtgagtgtgactgtgtttgtgtgagctccagatggcatttgcaacagggggaccttgaacatccatgaggtggacccctggcctcactgacagcccttcaccagctcccctcggctctgtttccaggaaacacatggtctgctgagtcatgggaacccccagctcagaggttcctgaactgagtaacctcaacaagaaaacccagaaagatcaacaggagagggcagaggaggaaaacccacccaaggaggaagatgccaggggccttgctgcccgaatgcccatgacctgccctggttctatgctgcatctccaccacctgctgcccacccagggctgtgggacctcctgctgccacctggccacccccgccctgccccccgcaccgtgcagctctgctgtgccggcccctgtgtgaggcatccacctcctgccagctggcctgccgcatgctcaggtcgggcctgtgtgtggccgcctcctgcgggtcctccaggtgctgcccgcccttctgccccttccctggcctgcagacctgtgacctgccacaccggcctgctgctgatggattatcctgataatcaactctctgctattgtttagcaaaagcctttccctttgtcctattatcagaatccccctgcacttctcagtccctggtgacagatccacctcccactgtggctggaatttcccctgaacgttcttgtgcaggaaggcttagttctctatcaaaaataagtctctctgctccttaatagtgggtctttttaaaaatttccctgaagctgtttctcgttgtcctttgccttcctgaccaagacaatgtcagcatggggttctgtccttggtcactgctcagaggtggagcttgaccctgggatgtcgggaagacgctctgggaaaagctgtggctgaagctgctgagtccaaagggggtgtctccttcccagtagtttcagacgaggatctctcagccaggactcttctggagcctggaaaccaagccacaggacgaagggctgcgggaagaaggaggctgagcctggggaacctggtggctgccttcgggtgtcagaagggctttcccccagcacgcgtttccccagaggctggattggggccactgaggcggtgtgacagggaggtagatttcagctcagcaggaggaagggtcccctgaaagccagggctcccagtgacacactgggcgcctggtgattactcagcttctgggtgctgagggctctgaaaggcaggcacacttgtcccactgtatcataacagaaaaaaccggaacggcccatgtgcccattagctggtggatggataaacacagcgtgacagagcggtacagcggaatccacaccagcactgagggcggcattgcttacgcacacggcaacaggaacgcatcgcagaaacaccgcgcggggtgggagaggccggcaccagaggacttgctgtatgactccatctgaatgagttctaaaacaaggagaaccaattcatgctttaaaaaattctcagcagtggccatctctgggggattgggtgaaattgactggggaaggcagaagagttctggagaggatggtaaagtccagggtcctgatgggggtcctctcccagccaggagggaagccaggaccaccctctcccctgggccttgagggggcctgggtgagctgtgttgacagattggcaaacttcgtcaaatgatacccttgagatttgaatcatttcacatgcaaaacaaatgctgaactcgagttaatggcaggttgctgcagtgtgtgagtgaagtgtgcggttgctgcaccttcccctgcagtgcctgtgaaatatgatgcactgacagaggccggctcgggggtgagtatccgatcaagcacagtgagtgacgtgccaggtgcagatccagggccgggcgcgtggatgcccactgtttaatttttacaacttttctgtatgtttccgtttttcataacaaaatgaaaataaagatagtttttaaaaagtagttcagaagatgaaaacagtaaatgttttcataaaaaatagaagccacacatgagatccttgctttggagaattgggctatgatcagagggaagtggggtgcagagaattggggtacccagcattcagggagaataacggtggatcgcaggtcagccaaatgtcccagaagcagcaggacagtcatgaggaagccaacactcaaacagtgtggctgccccagggcaggatggcagacccagcccaccattcccatctccaccttcccaagaccaccacaggggagggcaagtgagtttaccaaggatgagggactccagcaatgaaaaggaaagagacggccgggcgcggtggctcacgcctgtaatcccagcactttgggaggccgaggagggcagatcatgaggtcaggagatggagaccatcctggctaacacggtgaaaccctgtctctactaaaattacaaaaaatcagccgggtatggtggcgggcgcctgtagtcccagctagtcaggaggctgaggcatgaacccgggaggtggagcttgcagtgagccgagatcgccccactggactccagcctgggcaacagagccagactctatctcaaagaaaaaaaaatgaaaaggaaagagaagggtgtgtgtggactgccgaccagggcagaggtgggacccacctgcctgggagccccacacagctctgcttcccagcaagcccagcggaaggggagtggggagggctgcagtggagagggggactgaaggtgtgagcatgtcaccccctggccaggacccctaaaggccccgaggggcaccaggcacagttctctcatgctggcctcgggctcccatcgcttttactccaaagtgaggctggcgatggatggacctgcgccccgagcatagagcaccaggccaacctccccactcaggtgggggctcctccagcagaaaacagaccacacacacagcaagagaggagcccgggcagcccgggaccaccctcaccccagccaggagggaagccagcggcacgaaaagcaagaccaagataaactaacatatcactgcacccaggggaaaccaatggtttaaggaacttaaaaaatcctaaatacggccgggcacggtggctcacgcctgtaatcccagcactttgggaggccgaggcgggcggatcacgaggtcaggagatcgagaccatcctggctaacacggtgaaaccccgtctctactaaaaatacaaaaaattagccaggcgtgttggcgggtgcctgtagtcccagctactcaggaggctgaggcaggagaatggcgtgaacctgggaggcggagcttgcagtgagctgagatcatgccactgcactccagcctgggcgacagagcgagactccatctcgaataaaaaaaaaaaaagtcctaaatacactcagatattcaggaagatgttacatctaccaaacaaggacaagatgctttgaaaatgaacaattagaacaatgatccctaaaatgtcacagatattaaacatctcattgatatttaaaattaaacagagaggcttgaaggtgagtgtattagggttcccttagagggacagaatagaatgaatatatatatatatatatatatatatattttggggggggttactaagtattaactaacatgatcacaaggtcccacaataggccgtctgcaagctgaggagcaaagagatccagtctgagtcccaaaactgaagaacttggagtccagtgttcaagggcagaaagcatccagcacagcagaaagatgtaggctgggaggctaggccagtctcgcctcttcacattttttctgtctgctttatattcgctggcagctgattagatggtgcccactcagattaagggtgggcctgcctttcccagccactgactcaaatgtgaatctcctttggcaacacccttacagacactcccaggatcagtactttgcatccttcaatccaatcaagttgacactcagtattaaccatcaccatgaggttgagaaatcgctctgatttggaacaaaacgtcaaagagataaaaaagaaatgaggaaaaaataccataaatgactgatctagtgaatgtaatccctgatgtgtgggagtcccacaaagcgggacagtgagaatgatgagcggatgcacaaataaactcctaaagaggagcatttcccaaggctaaagacacagtcttcaggctgaaaagaaccaagtgatgccaagaaaaatgaacggaaaaatcctagatatgtcctctgttgaaatgatataacatcaaagataacaagtggttcccatgggcttccagaaaatcaaacaaacaaacaaatgaacaagtcacccacaagcaataaaaatcagattagcatcagacatctcatcagcagcactgaaggctacagactcacagaacaacactcatgatgtccgggaggtcagcattcagcccacgctttcaaagatgagcatgctgtaaataaacaggttaaacagaagataagcagttcttaagataagcagtaaacatgacagcaaattattaaccataaaactattaagtaagcatatgtgtttttctaaggctaagtagcatgtattttatcctctgggggtgtggtcatttgcttttctacatttttgtttgtctgtttgtttatagagaaggggtggtcttgccatgttgtcagtctagcatcaagcttctgggctcaagtgatccttccacctcagcctctcaagtagctgggactacaggtatgcaccaccatgccaggctcttttcaaaatattttaaagtagtggaaatattttttcaaactgaatctgacctagaagtcaagtctgtaaaacagattaaaacacagcttctctaatttaaagtgggatggagaatccagacacctattagtttgtcctcctcccctcccttcccttcatctcccctcgcctcctctccccttctctcctctctccacacttctctctctctccccagctcacccccttacctaggtaacatctgaaatgtctcctaagaacatgattttacaaccttgttgctttgagtccctctctctccccaagctctaagagattacggaattagcatgtgcatcattaggccagggaacagagctgatagcaaagaatggcactcacccctatgtctctaacgtataactgttaacaacatatgttgtatcagccattactcacagctgactttctctataataagcttattttttcaagaatccttatgtccccatccgtacactaagaccctaagaactgagagacagaacatcaaggacctattcatccatattgttccaattgcaaaaatgcatgaggacattatgtattgataaaagattcaactcatcaaagatatgagaattagaaacatatatgcaccatacaaagagtccccacatatatgaagcaaacattgacagaattcaagtgagaaatagttctacaatagttggagactttaatatttcattttcaataatgaacagaacatctagtcagaaggtcaataggaaatagagaactgaacccactataaaccagttactcacaaaagatatgtatagacactccacccaacaacagctttactggtgaatatcaccaaacatttttttaaaatttaacaaaaacctcctcaagttgtgaaagaaaaaaatagaaggatcactttctaactcactctgtgaagcaaacattatgctgataccaaacccacataagacatcaaaagaaaagaaaatcacagacgaacatgacttgtaagtacagatgcaaaaattctcaacaaaatactagcaaagtgattccaacagcatattaaaaggattatataccatgaccaagttggatttatcccaggaatgcaaagatagctccagattaaaaataatcaatgtagtataccacacgaagagaatgaagtgaaaaaacccacatgatctcaattaacaaagaaaaggctttgacaaagtccaacaccattttatgattttaaaacactcagaaaactagaaatagaagggaatttcctcaacatgctaaacagcatgtatgaaaaacccacagcttgcattatacttgacagtgaaagactgaaagctttccccctaagattaggaacaagacaggatgtcccttttcaccaccaatattcaacattgtactggaagttctagccagagctattaaacaagaaaaataaataaataaaagtcattaaaattggaaaggaagaagtaaaattatttctattcacgggtgacatgatcatgtctatagaaaatcccaaagaatccacaagaaagctactagagctttattaaagaattcaccaaagtttcagggtacaagatcaacatacaaaaatcatgcatgtttctatacaccagcaatgaaaaatctgataaggaaattaagaaaaacaattccatttcaatggcatccaaaagaataaaatacctagtaacaaatataaccaaggaggtaagagacttgtacaatgataactgtaaaacattgctgaaagaattaaagaagacctaaataaatggaaagacatccatgttcatggattagaagacttaatgttgttaaaatggcagtactacccaaagaaatctacagattcaatgcagtccttatcaaaattccaagtcttttttttttccagaaatgaaaaagctgatcttcaagcacatatggattataggaactcagaatagccaaaacaatcttgaaaaagagggacaaagctggaggattcacacttcctgatttcaaaacgtactacaaagctacagtaatcaaaacagtgtggtactggcctaagaacagacatatggaccaatagaatagaactcaaaggtcagaaataaactcatacatttatggccaactgattttcaacaagagtgtcaagataattcaataaggaaagaataatctcttcaacaaatggtgttaggaaaactagatttacagatgggaaagaatgaagttgggcccttacctaatatcatatataaaaattaactctaaatggatcaatgccctaaatatggtagctggaaccatcaaaatcttaggagaaaagatgggaaaaatgctttattcccttggatttgacactaggttcttagatattacgcaagaagcaccagcaacaaaagaaaaaataaattggacttcatcaaaatttaaaacttttttgaatcagagaacactgtcaagaaagtgaaaagacaatccacagaatgaaagaaaatatttgcaaatcatacatctgactgtgactcaacaacaaaaagacaacccaactaaaaaataggcaaaagattgagtagacatttctccagtgaaggtatgcaaatggccaataagtacatgaaaagatgctcaacagtattactcattaggaaaatggaaatcaaaaccacaatgaatgctacttcacacctaccaggatggctgtaattttttttttttaaaggaaaataacaagtgttggcaaagatgtggagaaattggaaccctcatactttaccagtgggaatgtagaatagtgcaaccactgcggaaacattttggtggttccttaaaagttaaacatagaattaccacatgactcaggaaataaggagcacccaaaagaactaaaaataagtaaataaataaaaagagagaggctcaaatagatccttgtatgtcaacattctttgcagcattattcataatagccaaaaggtatgaataacccaagtatctaccaacagatgaatggatgaatggattcacacttcccaattttaaaacctactgcaaagctacagtaatcaaaacagtgtggtactaacataaggatagacacaaaaagcaatcaaatctaagagtccggaaataaagctattcattcatggtcaaccgattttcaacaagaatgccaagaccattcaatggagaaggaatcatctcttccccaaatggtgctgggaaaactagatttccacatgaaaagaaacatgtggtatatctgtatgaaggaatattatttatccataaaaatgaaagaagtcctgacacatattgcaacacagataaacattggaaacattgtgccaagtgaaataagtcagtcacaaaaaaaacaaatattgtttgattcctcttacatgaagtatctagaacaggcaacttcacagaaacagaaagtagaatagaagtgaccagtgacagtggggagaaggaaatggggagtgaatgtttaatggggacagagtttcagttcgggaagaagaaacagtcctagaggtgaacagtggtggtggttgcacagcactgtgaatgtacttaacccacagaattgttcacttaaaaatggttaaaatggtaaattttatgctatgtatattttaccacgatgtttaaaagataaaaatagttggctattttatgttatatatattttatcacaaaaaaaacatttttaaaggcagtcaaatggaagaataggcagttttagcacacatgtattgataaagtcataataaacaacaattattgagtgcctatcatgaaaataatgcacacaaggctgcaggttgttgaccttgctgagtctcagaaaagtggctcgagtagctcgtggaggaagtggggagaaggcggcgctcacagagcttcccgtgagccggtgcagcatgaagatcgaataaacctgctgaggacactccgggtggaatggcgtatcttctagctcttcaatgtcccttctgctcacacagagcatggagggtctcccctggacttgccccaaggggggtcgtgctttgccccaaccctccaggcctctgccacaggctggaggagctgcttgatgcagacacttgacctcggaggtgtttaacccagatgtccccagatcctctggccttctgaggtcactctttataatccaaataaaataacaagagacagtgccctccaaactgtggggaacctatccagcctcccccgaccccaccccaactcctgtggctttggggcattcacactctcctggtcctgtcctggcacctttgctcccactggactggacgctgtgctgtctctcaggtacgcaagtgcaccacagactctgatatgtacagaacaggcccctgggtctcggtccccaaagcacctcttctcagaccttctactgagaggtcgggggtcgggtcatgacacacagcaggaaatgaatgcacgactcaggccagaggcatcagctggtcctccctcccttgggcctctccctggccatgccccaacctggctcacactccctcagggttgcaatgacctccgatcccaagacccttttcccaagtccaatttttcctccaagttcctggtcccttgtggtgggccagtttattcagcttaggagaaatgattgttaaatattcagaatcttctcaagcaggttgttaaactgctcatagcttgaaatcagccaggatatgaatatttacaccacggatgacagctaacactccacgccagggttctcatctcaccgcagcgggacaggggtacacgccacacaccagggtttcatctcatcacagggtaatgtttacaacgcagagaccagcagacaccacacaccagggcttttcacttcaaggggcccatccaccacacacctcgagccctcacctgctggtcactgcctgtgggcctgaagccctccaactttccaggcagagccaagcagctctcccttaatctcaggatcctccaggctagatgagccctggggctctagagtcctcaaccacaaaggctgccgaatgtcttcttctcaaaattaaaaacaattcacttcccataaagaaatctttcaacctcctagaacaacccctctgaactctgaactggaccttcccttcacaataatgttttttcacattcccactcataaataaacccaaatcctctctctttagatggaaggagctccttttttatagctagacccaaccgtctgggcacccatcagatattttcacatcaatcccacaccgccatgtctaaaccatgctccgccccgctcttctcacacaatctgggtttctcattctgatttcccatgtcccttgctctctgaggcagcagaggttaatggctaagaacatagaatacgggcctgccaggcctccagtgtatgctcctctgcctgctggtgcagccttttgcacaagttcttcattgtgactcagtttctccatctgtagagtggggataataacagcccctactttacaaggttgatgtatgggttagtgaggtcatatttacaaacttgctcagaatacttcctgacacacagcaagacctatcacatgactgtttgccgaaaaaaataaaaataaatccagctcccaagccattcattggtctacggattcaagataaagagaatataaaacaagaagaaaaacatccttgactcaactgagtgtgaagaaattagggggaaataatagtaagcaataccaaatgacaatcacagaggggcggccaagggctgctgaccttctgtggtccacgcagaggctgggctccagcccattggccggctccctccacggccccacggtcccgctcagttctgacacctggggagcttcaggagctaagctacgctacacggttcatggtgagcatcctcaagaaaccaccccaaacaccaacaaggaaagaagcctggggccttgtgctgggacaacacacacacccttgagagatatataagctcctagcacccagacactcactcactccctccttcccatccagcacccagacgctcactcactccctccctcctgcccatccagcacccagacgctcactcactccctccctcctgcccatccagcacccagacactcactcactccctccttcccatccagcacccagacactcactgtctccctctcagctcccccagctcaacccccagcacggctgcatccaccatgtccgtctgctccagcgacctgagctatggcagccgcgtctgccttcctggttcctgtgactcttgctccgactcctggcaggtggacgactgcccagagagctgctgtgagcccccctgctgcgccccggccccctgcctgagcctggtctgcaccccagtgagccgtgtatccagcccctgctgccgagtgacctgtgagcccagcccctgccaatcaggctgcaccagctcctgcacgccctcgtgctgccagcagtctagctgccagccggcttgctgcacctcctccccctgccagcaggcctgctgcgtgcccgtctgctgcaagactgtctgctgcaagcctgtgtgctgtatgcccgtctgctgtgggccttcttcttcatgctgccagcagtctagctgccagccagcttgctgcatctcctccccgtgtcaacagtcctgctgtgtgcccgtctgctgcaagcccatctgctgtgtgcctgtctgctctggggcctcctctctgtgctgccagcagtctagctgccagccagcttgctgcaccacctcctgctgcagaccctcctcctccgtgtccctcctctgccgccctgtgtgcagacccgcccgccgcgtgcccgtcccctcctgctgtgtccccacctcctcctgccagccaagctgcggccgcctggcctcctgcgggtccctcctctgccgccccacatgttcccgcctggcctgctgaggcctctgctcaggccagaagtccagctgctgccaggcatgtcccccagggccactgggcactatgagtcccccacctctcccactactggcccctcggctgctctggtgtctgtctcttccttggagatgcgtgcacagcctctcttcccctaagccctgggggctcctgctaagctccagatgaccctgcctccacccactcccccggctcttccagaccacttcccacattccaggcccctgtggtctcgcctccttggaagctgctgtgcctcctctggccattgtaggaccatgcttggaagtcctaataaacaccctccacgtagcccggctgcactttgctctcttctttgagtcatttctggttgaattgctgaccagcccgacaggaggccaggacacagatgcagcctcctggggccctcgcgcccagtctcagcccttctccaggccccaacacacattagtctggcactggtgccgtccccgcaggaatgtaccagtcccagggagggtcaacggagcggccgtccccaccccagcccagcaggcaagtccgtctcccagggccctgatgggcgagtgtcagaggtggcagcggggtcactcgcaggcacagccgtccccaccgccccacatttccccgccaagttgccagtccctgccaagtgggggctggctggacacggagtcctggctgcagacagagaggatggctcgctccacctgcagcccagcccctcagtcctcacagggagattcagagtcccgggacaagcgtccaggctcagctgccaaacctctcccacctctccagatccagaagcggtccacttccttctactgcccctacaactcccgtgtctgaagcctactgcccagatcatgaatatcttgaagtctcttctaacagaaaatagataaagctccagccggggcaacagagtgaaaccttgtctccattaaaaataaaaaggccaggcgtgtggctcaggcctgcagtcccagcattttgggagactgaggcaggaagatcacttgagcccaggaattcgagaccagcctggccaacatagtgagaccttgtctctaaaaatacaaaaattagcagggcatcatggcacgcgcctgtggtaccacctacccgggaagcggaagcagaagaatcactcgagccgggaggcggagggtgcagtgagctgagattgtaccactgcactccagcctggacgacagagtgagaccctgtctcaaaaaattaattaattaattaaagtaaaaaatacatagctgggcatggtggcacgaacctgtagtcccagctactcaggaggctgaggtgggaggatcacttgagcctgggagatcaaggctgcagtgagatatgattgagccactgcactccagcctgggtgagagtgagacactgtctcaaaaaaaaaaaaaaaaaaaaagggttggggaaagaaaaggggtgcagccgaaggcccctccctcctgactgcagcctctgactcagtgctgccttgcacctcccagaggaagtgggtcctggtgaccccatctcacccccagctcctccaacacaccgttcttctcttccctcttcccacagctggccaagaactgcggtgctcaggtcgctctccctctgtccctcactctgccggccagcccctgctgcgcctggccctgtaacgccgtctccctgggcttctgggatgcgtctgtctcagctcctgcacccactcctctgacttttctctatgtgcgttctctccctgcccccaaactccaggtctccaaccaggtgcctcccctgggctcccagccacgcttacggcggcctccaggtgtgcccccagaccgaagggaagctgcatctgggcacatctgaagctgagctagcgtcttcctccaaactgccctctcccctgaccggctggggcagctggactccaccccgtcccccgccctgccctggccctgccatcttcactgagctgccagatatctttggggtctgccctgcctctcccctccaccatttctttagcttagggtgatttgctaaacagctctgggccagcagggctgccaacagtcctgtccacaggtaagagcatcctaggagacgccccgtgctttgagagtgccccatgacaacagagattcttctacagaattttttttggaagaaagcatgttctttgtccaagagaagatgctgattttggagaaagataggaagaacttggtgacttcaggcgacactctgccttccagtccagggttccaccaccaggaaggctggagagcaggaagaaaagggctggcagcacaaaggctggggtcgtgctgggtgtcacgtgtgcttggcagggagagccgttcctctgtccttgctggggcccctcctctgccgacccccagtgcagtccctcagcccatccctgcaatccctcagcgatgaaggacgggagagaggaggccagtccacacgagaagagccgagggagcagagacttcccagaaccccccttgccaaccaaacagcacacagtgagaggggcctggaggccccgggggtgccgcatgaggccttctattttgtcagaaattcacgatatccatgaagtccgtggtttgaatctgccttggggccgggcagtgggaacttcacggttaaagaactcctgggggccctgaagcctcagcccctcagcagtgtctggttaaacccacctgcagcagggaaaccttccacctaaaggcatcccaggcttgccaggcttgagaggaaattcaggtgtcactgttaagcctgatactgcctcgtggccaataaaaacagtggctgaccttcaggaagccttcgtgacctgttttgaaccacgtaatcctcacgtggccttgtggggtgagtggaccatgaccccatcttgcagaaaaggaaaccgcagcccatagggtgatattccaaggtcgtgcaagccaagtcagaggtgagaggtggacagaggcagaaaccaacagaaccctgggaaagggtgtggtggtgaaatgacaccccccagacaatgtccctaccctcatccctggaacctgtgaatctgcccttatagtgaggaaaagcactttgcagattgattagattgctgattaagatccttaaacattttttaaaccgacacatcattattgtacatatccatggagttcccagtgacgcttccatagggacagcgcggagtggtcgggccggggtgcccagagctcccaccatctcaaacacggactgtttctctctgcggggaacattcgataccttccttccagcgacgtgaaacgatatattcttgctgatttacagtcatcctacagtgctatctagaacagcggtccccaaccttcatggcaccagggaccagttttgtggtagacaacttttccacggactggggagggggatggtttggggatgattcaagcgcattacatttattgtgcactgtctttccattattacattgtaatttataacgaaataatcatacaactcaccatcatgtcaaatcagtgggagccctgagcttgttttcctgcaaccagatggtcccgtctgggggtgatgggagacaggggcagaccatcaggcattagattctcacaaggagcaacagagacccctggcatgtgcagttcacagcggggttcgtggtcctctgaggatccagtgcttccactgatctggcaggaggcggagctcgggtggtaaagctcactcacctgccactcccctccggctgtaaagctcactcacctgccactcccctccggctgtaaagctcagttcctaacaggccacggctgtagtggtccccgtcccggggttgggaccccctgctatagaacactagaacgtgtcccccctgagcagctgcaattctgtgtctttcggcaagtctctccctatcctccctgccctgtccttccacactccagcatctcctgccctgttttccttccgtgagatccacgttctctgtcttctatctctgagccaagttcagagccctgagatatgagatgatcctggcttagccagagagaccctaagtgccgtcacacacgttcctatgagagggaggcagggaaacttcacccaggagaggcagcgtccacatgagcacaggggtggagactgaagcgatggagcagagaccaccatccaccccacagagcaaaagctccagaggaacaaaggggcctccctgagccagtgcttccaccaactcctggcaggtggacgactgcccggagagctgctgcgagcccccctgctgcgccgccagctgctgtgccccggccccctgcctgaccctggtctgcaccccagtgagctgtgtgtccagcccctgctgccaggcagcctgtgagcccagctcctgcacgcccttgtgctgccagcagtctagctgccagccagcttgctgcacctcctccccaagccagcagtcctgctgtgtgcccgtctgctgcaagcctgtctgttgcaagcccgtctgctgtgtgcctgtctgctctggggcttcctccctgtgctgccagcagtctagctgccagccggcttgctgcacttcctcctgctgcagaccctcctcctctgtgtccctcctctgccaccctgtgtgcaggcccacctgctgcatgcccgtcccctcctgttgtgcacccgccttctcctgccagcccagctgctgccacccagcctcctgcgtgtccctcctctgccgccgtgtgtgctcccacctggcctgctgaggcctctgctcaggccagaagcccagctactgacgggcacgtcccccagggccagccaggctcaggttccccccaacctctcccactgctgacctctcagcacacgcactagtacacaccgcactggtacacaccacagtgtgcaagctggctgacctcataccctacaaccacggcttacctatccactacctccaagccaggcccaggaaaccatgagacagccctctcctattattgaagggccccgggtgttccctggtggaatattcccccatagccacaggaggtccctggccccccctgcccttctcctccaagccattggccgcccttgcccaccacgtgccttgcacaatgaataaactggccttccctgcctctgcgtgctcctctcccagcctagtgtttatttcattctttctcgggccctctatgcaaacacacccctggcttcggcaaccctagagacgagccacgtcatgggagcatttccagtggcgctgagttcccggctcccatccccacagcccaggcctcctggatctgcacctccaggcagctctcagggtgaccctgctgcaaatccaggattcaggtggtgatgtctctgatggcacatctggccagagggctccttggcaggaggggcctggtgcccccatgcctccctgtccctggtgagtttgaggaaccccggggacagggcccaggttggcttctgtgcagggccctctgcaggcacagctgaagctgagtgtcgctgtggtcaaccagctcctaggtgggctggggtggggcctccctctccccgggagccctggcattttactgaaatggccaacgccttctgtttgtgcttgtgaaggctaatggcaacacctcttctgtggccccaggtctagccgggcgtggcagaggtcagagggaaagaagccaaagggtacatgacctagggatcccacacaatgggatctggggcccaagctggccactctttgggggtttcctttggggccagtgtttccaggatccccaagggtcccacacccagcctcactccccgccagagccgcctcctcacctgctgtcccctccacaccacaccagtgccaccgcccagctcctgagtccccccagctgcagtggagctggaaccggctgggactgagaggggtgcacagggctgcaatcccaggaggccctgaaatccagcaagatgttcccaggacccttagtgcaggtctaagatcacctggcctctgtctgccctggagagtgtggggcagatgccctcaattgggccagcttttccagtgcactctccctgcaaggaccctcagtgagaggagggccctcccgcaattagaacagggttggtgtaaatgggttcagacagactggatcctaccatcctcttcctagcccctgggggtggggaggtagctgggaccctgccccctgcttccctgggtaccccacccccccaccactctccaggggtccctaccatggaacacggggtgagagaagccagtttcccacttccctggctgttggggcctgaaattttctgtagcctgtcagtccagactttaccccctctgtgacattatcagcctccttctagccaagtccacccccaacccccagggaacccaaaccgtgcggggtggccctgacctgccagagctgttggcctccagctggcgggtaaaacccacggccttctcagaacaggtttctcaacacatgagacagaacacaccagacttccaaggggaacacctggatggagctggttacccagattgttcaacaccgaggggcagcggcttgagggtctttccacgaaggcttggattaacaagaggagcagaggtctctccaggatgggcccacaggaaatttccagaagtctaccacggggaccagaagaggagcctcggtgggtgacagtggcaggtgctgcccactcagccatgcgctgcctccacacccatcactggggagatgttttcaggagaaagatgcagcagctcccacccagtgtcacgtcacggccccggcacgccatccacggaccctggatggagcccagctgcctccgggagcgcagtttaactacaaaggagccctggctgcccgccccgcccagacgcactgacctgttgttctctgtggctgctgatggcccatccccaaccactggtgactcttccctggggccccaagctcagcccctaaccccctgttgctggaagtcagggaccccaaacagagagaccggctgaaaccatggcagaagaacgtggattgtgaagattttatggacatttattagttccccaaattaatacttttgtaatttcttatgcctgtctttactgcaatctctaaacataaattgtaaagatttcatagacacttatcacttccccagtcaatacccttgtgatttcctatgcctgtctttactttaatctcttaatcctgtcagttgaggagggtgtatatcattccaggaccctgtaataattgtgttaactacaaaaattgtacagcatgtgtgtttgagcagtatgaaatgtgggcaccttgaaaaaagaacaggataacagcaattgttcagggaataagagagataaccttaaactctaaccgccggtgagccaggaagaacagagccatatttctcttctttcaaaagcaaatgggagaaatatcgctgaattctttttctcagcatgggatatccctgagaaagagaatgggcacctaggggtaggtctctgaactggcccccccggggcgtacctgtctcttatggttgagactgcaggggtgaaataaactccagtctcccatagcactcccaggcttattaggaagaggaaattcccacctaataaattttggtcagaccggttgatctcaaaaccctgtctcctgataagatgttatcaatgacaatggtgcccgaaacttcattagcaattttaatttcgccttggagctgtggtcctgtgatctcgccctgcctccactggccttgtgatattctattaccctgttaagtacttgctgtctgtcacccacacctattcgcacactccttccccttttgaaactccctaataaaaacttgctggtttttgcggcttgtggggcatcacagatcctaccaacgtgtgatgtctcccccggacgcccagctttaaaatttctctcttttgtactctgtccctttatttctcaagccagtcgatgcttaggaaaatagaaaagaacctacgtgattatcggggcaggtcccccgataacccccagctgcagatcgaggcctagtgcgagcacaggtccccccagacccttcccagtgcccaccaaccggcggcctaggccaggtagaactggcagcgcctcccctgctgcaacaccaggctctggtagaaacttcagaaaacatgcaccggcaaaaccaaggaagggtggctgcgtcccgggttcttccgcgcagctgtgtgtacacgcatgcacacacccacacgcacacacccacgtgcacacccccatgcacacgcacccacttgcacgcccatgcacgcacacacgcgcgtgcacccatgcgcacgcacccatgcacacacacgcgcgcacacacccacgtgcgcacccacatgtacacacccacgtgcacacacccacgcgtacacacccacgcgcacacaccgctgtccccagccgtgcagaacgatcctccctgagtccccggctccgacccacacgcagcactcgctaaacgcttcccacgcagtcgttttgctgggttgcgcttcacccacttctcagagggggcggccgaggcagaggtgtcggggatcgagcagctccgggcctcaggggtcgccccgccaccgttttcctttcccagatgctgggacgggggcagggaggggctccccaggctgaacccgactaggtcaccctagaagcgaggcgagcttctcttctgtttttcttcggcgcccctgagcccctgacagtgcccaagctgcccatgggattggattcgccagagcctcctacgcagaccccacccagggccaaagccaaccccaagccccaccaccttggtggtgtgggatgaaaagtgagccatcgagagatggggtccccccacccccaacccctccaaggacaaaggcgggctgggaagcacccgctttcacgtccgcccctgcccggctttcctagcggaattggcgccggcatcagttgggggttgtgggatcagtgaggaatcccgtggggtcgcctccatttatcagttgtgtggggttgggcgagcacccctagccccagcccaggcgatcagggcgcgaagcccactggacgcggatttgggattaggacgggggtgacagccaggaggaccgcacctgccctccccactcctgccgctccacccctgcccccaccgcaacaccaaggtctccaccaggaagatgggggtggggaaaggacgcggggtgggggggggtgcggggagagaggacacagggtcggaagggtgaggggtagtggcagaggcggaggccgaggccacgcagctgcggggcgcagggaggggcagaggaggggcgttcagatgggaacctagtccagacccgtcggggccctcgtgtgcggctcgttatcctggaaccagagaggctggagacccttggcttgtctggagcggaaccgtagtgtccaatagagtgtgtggggctcagccctaaagctaaacattctttatttcctgatgaccatgggggcggagcgggggaaaagccctggccttatagtttagaattttataaaaggaaaggcgtggccactgacaatttgcgcttcaggagtcccagagtgaccgcctggctcggagcagggaatgagggggtccttaactctgagatttgttttctgagagacaaaggtgatgggtgaggcggctaagcctctgattctctataggtggcggtcattcatttcagaacatgaatggattcagtaaataaacatgatagaaaaatgccacaagccctaggcccattggagtggactggacagtctgttcccagtgtgtccctcagcctcggtcccccacccttcccggagccctgggggtcacacacatccctcctggctgcctagcctgtgccccccgattccccccctccccgccccgcgcgtgcacacacacacacacacacacacacacacacacacacaccacacagcacgaggcgacagagatatgagagagagcgagcgagagaggacgggagagagagggagtgcaagtgtgcgctgggggtaacccgtgcatgcatgcattgggggtaacaggctggagctcagatccctcccccagcccccagcaggggggactgcaggctcctggtctgagtggggagctgggccccctggacagaggactgggctgcggggtcaggaatgggcacacttcctaactgcaggacactctaagggctttggtcatgcacacgcagccaagagaaggtgtcgctggcacacagccttccaggagcggacttggagacctcgccaaggaccaggactccccagcactcacactcccttaggcgctgaagtccagaggacagaggttgagggcagagctcctgggagcaccagtggaagtaggagggctgggctggaaaacctcccccaacctcctattgcaaagaggctccagccagcagcctccacaccccagtgatcttttaagatgcaaatctgcgccatcatttatttcctcagtgccttctccagctcctgggatgcacactgcccgtccccaggcccagagacctgaccaccctcattcctccctcagcccaccctggggtctctccaccagctgacagccttcctgcagtcccctccccgaatgctgctccctgaggccctcctggacacctgcagggcaggcacagcccgcgggacctcacagcacttgctccgggcagagctgcagtttggccaagttgccagctccgtgtgggcaggggccctggcctgtggctgccacatcccgggtgggggcacggcctttcctggcgtggatgctgagcaaacgtagggggaaggggagtgaatgaggagagccaggtagctcaggggctgaggcctcactgagcagggtcccgcgtgaccggtccccaccgctgacggttcctggggtaacactcaggacagggagaggcaatggaaagagacgtggccgccctcgcatcctgcagctcccgcactcccagcctcccagcctcccacccagccccccagagcccaccagtgaccccgcccactgggtcctcagatggctcccacgggatctcctgccttgatctcctgtccacatggaggtgaagtgggttgctctgaatgaggggtgccgagcctagggcgcagcccactctcctgggtccgcagcatcacgcagcccggaccacaggctccttacaagaatcggaagggtccctgcaatcgcccttcgcactgaggcttcctactgtgtggtgtaaaaacacaggcttgtcctcccttgctgcccacggggctggagccgcctgaaaatcccagcccacaacttccccaaagcctggcagtcacttgaatagccaaatgagtcctagaaagcgagagacgagaggggaatgagcgccgaaaatcaaagcaggttcccctcctgacaactccagagaaggcgcatgggccccgtggcagacccgaacccccagcctcgcgaccgcctgtgacctgcgggtcaaccacccgccgcggctccacgccgtgggcacagactcagggagcaggatgagaaagctgagacggcgcagccacggcccggtgccttcacgcgcacagcgacacagccccagccagcggggcccacgctaaggcggaatcccacagaagcctacagagcgagcgcgcgcctgtgcttcccaaaacggaatggaaccaaggtgacttctacagaacgatctgaagccctggctggcccttatgctagtctcttgggagcgttccaaatgcagctcaatattacttacttgacttttatctttcctccctggttcgtggtatttataactgggtcatcttttaactatttgcaacgtagcttcaggggagagggggagggctttataaataacctgtattattattatgcaggttgattctgttccctgagctaaagggaacatgaaaatacatgtctgtgactcatgcccccccacccccactccagggtgtgctgaggagtctctcagctgccccggggtcctcgagcaggggagggagaaaggctggcgctgcgccctccatcgcgtgaagccaggggattttgctctgcgacaagctgacttggctctcgtattgtttgcagaatcacccagttccaaggcagtccctgcgggcaggtgcagctgtgcgggagcttcagtcctgtccccaacacccaggcagtaatggttccagcacggaaggtctacctacctcccactgcacagcccgagggctgtcctggaggcacagccatccgtccctgggtgggcaggcacgtttatgacccccacccccacccccaccccccacgcgagtcagcacgttccatactcgggtgatcgtgctcatcccctggtcatgtcatcgggatctgagtgccatccgagcagagagctgtggcccggtgccgggggtggacttcatctattccagggaaccaaggatgcatgatttgcaaacaaaaccagaagcgcaagccatctcctcgcctcccctgatagccgtgctgcggagcctgagtgctggagtcactaatttactgtccagtaactgagtttctagcgaccaggtctagttgtcgtgttactttattaaattttggtttgataagtaaaatccctcagtagaaactctagaaaagtattagcgtgtcatggtcatgagcaagccaaacagcctttctaaaaggtgggaaggagacccccaggcttcgccaggaccccccagtgagccagcccagggctctccactcagaccagattacgccccaaagaaccgagcccttcactccagaggtggttgtgtttggggctgtgtctgtgtctccagctttttgctcatgtggggaaggagcagggccggtgtggcccttcgctttgctgagtgcaggctgggggcacctccaccagctaaggaaatggctcgtgcacagtagcctcccgggctgctgcgacttcattcttcattcccaaagcaggtgtcagcctttcccgggaggcccagcaggtaagcacttgtggaggccccggtggctgctggttagctcttgaagctcgtccccaccctgcgtgcgttctaaagagccgcgtttctattgcaactgcctgccctgcgctttcatcttccccacctgtgctcctcccgcctctgcccatctccacagggtgctacctgccagtcctgccaaagcgtcctcgggcaccgcggcttgaatcagtgttagaaagtggcatttgtgactcgacacccctcccagctccccggcaagatacccccgcccgagttcccatgcccctgccttacctgtgcagggctcccaaccctgcgtgccgtggccgggggccgccaggggcagcacaaaacacagactcagcagggcagacatgaggggcttgggtgccaagctccatccagggctccgctcagcctgcagggaagtggctgctcctcagacgtctgcgtcagcctttccaggggcggccgcggggcccccgggggtcactgcgacggccacatgccagcggcctaaggcggggacagaggtggccctggcggtcgcagtggggaagcttctggttgctgcctgcgggaggcaggtggcccctggcaggttgggctgcagccgctggtttatctcttcatttccctgatgggcttgggccctgcgtgcaggtgacaggtgataacaatctcggcccggcctgggattagtcgctggcaaagcacactttccaaaaggaaagacagaaatagatcgtgctgcggagagctgagaacaagccagagaaacttaggagacccgtttccctcaggcgcaggctccctgggctcaccgccttttaggaccaggggcacaggcgaccatggcaggccgggagcgggtggggcgggtgcactctggctgggggtttgggcagcaggtccccacagtctgctggagggtcccagaggcaggtcggggctctgctagggggtcctagaggcaggtcggggctctgctgtggtggggagggggggtcccagaggtaggtcctgtgctctgcggggggtggggggtggtcctggaggcagatcccaggctctgctgggggtctaggcggcaggtcccgggctctgctgggtcccccggcggcagcggccgtccatccccaggaggggctgggctccctcggagggctttttatctggtgcccagccctcccgagggtgtgtgggtttgtcaactgttgggtttcaggaatttccctctggagggaagtcggtccttaaagggaacagctaatgagaaggagtgggtgagtgtccctcagggaaggggcacggccatggtcactcatccagagccgaggaccctcgcatctgacctctcgacactgcaatgggcatgccactcgaggggagcagctattaactagaagtattctttttacaaaagtgccctgcccccctaccctctccaaacagcactgaacgcagcattcttgcagaaatctccaacgcaactgggtgctgcgtttctgtgcctggtgtggaggccctggcaaactggtctgaggccgatggctttccctggttcacaggcccacaaagtgcacacactcctgctagtttcagaaggaagcccccactctgggacctctgacacaatgagttttccaagagcatagaccctgtcattagggcttgtggagagagacagagatggagggagggaaggagaaaggggccgaagagagggacagagactggggaaagacctagagggagagggagaaagtggggaggcacagagagctcctggggctctggaggctcttcccataaacagcccctgcgatgggacaggctcattctgtctccctctcgcttcctcttttacccggccctgcccccagggatattaattcatagttaatattaattcacagatattaattcgtagtcctatttatgaggcttgagttaactggcatcatatgaagggaggttgaaggtctcccattatatgtgactcctcttccagcacccaagtgagccctggggtggggtgtgtctccctcaccccccaggaccccctgccagctccggtgggcatgcagtgccaggacagaggcttcctgagtgggctccccaccccactggggctcagcagctggaaacgctccacatagcaccattcctgacaaccctaacctaatgagggacgacgtggttcctcagaggagcgaaaggcctgatcgttgtgtaaatggaataaatggagtcttcctcttttgtgtcccaatccatgagaactttgtcctgggccaggccgctcccaggccagctgcgggtcacagtggcctctgagaccacgcccctgaggggatggggactccccccaaatgatgggcaggtggcactccagagctaatttaaacaatcacaattaagctgccttgaacccttccggcaaaatttttcttatgttacatttgatgcagtagcactagtaatagcctcaaagataactaagggtgagccagtggaaatcctcctcacatacgaaacttcacaaagatgtgctgagcgcaggaggaaagctcagagttccctcctctacagctccctgtgtgaccctggacaagtcacttacattctccaaggtttaacttccacgtctgtaaaatgtgcctaggaggacacatgtggtagggctgtcctataaattaagtgatagctataacgtacctaaatcagcatttctggaaccacgacccagggaacaccagctccaaaatgctcgatgagaaaaagcaggtgcatttgcaggtggactccacagccccttcctcagggacacaagcttggctcacccacgcggagctctgagacatcagtgatcagaagcctgcttaggctgggcgaggtggcacccgcctgaaatcctagcagtttgtgaggccgaactgggaagattgcttgaaccgaggagttcaagaccaacagtgacaacatagtgagcctccatgtctacaaaaaattctaaaaattggctggacgtgatggtgtgcacctatagtgccagctactcaggaggctgagattgaaggatcacttgagcccaggaggtggaggttgccgtgagccatgatcataccactgcactccagcctgggagacagaggaagactgtcgagagagaaagaaagaggaaggaaggaaggaaggaaagaagcaagggaggggaggagggagggaggcaggggaggggaggggaggggaaggagtccccacccaaatctcatgtcaaattgcaattcccacatgttgaagaaggggcctggtgggaggtgattggatcatgggggtggtttccaatgctttagcaccatccgtcttgtgctgtctcatgatggaattctcatgagatctgtttcttcaaaggtatagggcattcccctttgctctctctctctctctcctgctccaccttggtaagatgtgctggcttccccttcaccttccgccatgattgtaagattcctgaggtctcctagccatgtttcccgttaagcctgtggaactgtgagtcaattaaacctcttttcttcgtaaattacccagtctcaggtagttctttatagcggtgtgaaaatagactaagcaagaaagaaagaggaaaagaaaagagagaaatcctccacatcatgtgtatcaaagtctcatggagacgaatccccagaacccactaagagaaatgcatgtgcaaagaagaaagcatgtccctgccataacatcagacatcagaactgagcttcactcccgagaagcaggttgggtaagtgctgcattgttaacaagggaattcacggggcaccaggccctcacagcataggaaggaacggcagcccatcccaggtctgctaactctgcctccaaacgacaaaagagaaaatgttccaagaacttcccccaaacacatcctggtgcaggctgtcactcaatttgtctgcttcaagggaaacagagacgatcaatagaagaggaggagggctccatctatcctctaaggacacaggttgttaatcaagtcagatcagtaacaaaccccaggaggtcatcacgggcttcatcaagctgcagaagtaacccttagcgtgtcattgtttggccaaaggcggctgtgaagtgtgtccatgtctttaaatattcaacatgccccaaccagggaacaatgcattctccaagaaaacaaggaacagagctcaaagagaaactgaaaatgataactttatgttacaaaaataacactcttacattcactcctccagttttgtgttttattaaactaaaccatcacttctgtgatctatgaaccccagaaggactttgtattttggtttttgttgtcttttttagagatagtgtcttgctctgtcaccaggctggagtgtagtggcaagatcatggctcactgcagcctggaactcctggcctcaagtgatcctcctgccttagcctcccaagtagctgggaccagagaggcacataccaccatacccagctaatttttaatttttttgtagaaatagcatcactatgctgcccaggctggtttttaataatttaaagacacaaaaattcttccaggatacaccatcacttggtatataatgaccactgttgtatgacatttgaaaaggtatctaaaaaaaagagaaggcacacacgtggtgtttgacaatgagtttagatagactggggagtacttggcaagcctggacaatgagcattagccaactctctgggtgatatggcctggctctgagtctccacccaaatctcatgttgaattataattcccagtgttagaggagggacctggtgggaggtgactgaatcatgatggtggatttcccccgtgcttttcccgtggtagtgagtgagttctcaggagagctgatggtttaaaagtgtgtggtgcttccctcccttgctctctctctcctgctccaccgtggtaagacgtgcttgcttccccttcaccttccaccatgattgtaagtttcctgaggccttccattcatgcttcctgttaagcctgtggaactgtgagtcaaataaacctcttcatagattacccagtctcaggtagttctttatagcagtgtgagaatgaactaatacactggggttatatgctgttgggccaggccatccaaggctgggctccccatcattgagcagttggctccatcagtcactgagtcaactgaccaggcacaagtgaggtccattgtctccagaaaatgcaggctagaattccaatttgaaagtcatttagatctcattagttatttaataagagaataagagattattttctcacataaagagttctcttttttttcaaacaagaaatactgtaggtcttttatatgactaagaacaacataattattaatcttgacctccaaggagaggaaattttggctcttaaaatctaacactagaatctgacccttgacccattacattagggttcccatttattttttttttcttttgaagagatccttaaatagtagggtattaccctttgtctgctttatcctgattgcttctgtgtgtgtgtgtgtgtgtgtgtgtgtgtgtgtgtgtgtgtgtgtgtgtgtgtgtgtttagagatggggtttcgccatgttgcccaggctggtcttgaatgcctgagctcaagtaatccacctgccttggcctcccaaagtgctgggattacaggtgtgagccaccacgccctcccaaagtgctgggattacaggcatgagccgccacgcctggcctgcttcccttttttggatgctttgttttaccttgtcattttgccaggtgtttaaaatgttcatttagtcagcaatattttctttgagactttatgggtcttaaaatacaatttttattctaatgctcactaaacttggagacaatttttgaattacaatttttagacttttttgctattgaattgtatgtgtctatttagatctctcttccatctggaatgtgattttgcatatggagtgcagtgaatctaactctgtttccagaaagtcattatgcacattccatttattacatacttctttcccaccaccttgaaatgtcacatttatgattaattaggcttctatatatacttggatctattccattaatcttggctctattccattaatcttggctctatttatctctgtcaatttcctttgccagcattatattattttaataacagtatttatagtaagggttcatactgataatatatgcattagtttcccttttcaaaaatgtgttagaaattataacatacttactcttccacatggactttaaaaattattggtttccatctgcacctcccaaatcaaaatcaaacaaggaaaaaacactatagaaatacctattagaatggcaatacctccatagattaatttgagaatggtggacatttttatgatatgaagtcttcccgctgaagatatgtttattccaatcttcaattatttttttaaattatagttatgactgtagaggtcctgtattttctctgtaaagttcttcctataaatttctttgtgatttcatcattattgtaaacatattcccccatttctatttgtaattggttattgcttgtataaagaaaattgtttcattttttatagttatatctagcaaccttgaagttactatgtgattttagaatctcttgtttttctaggataaataattttcctcttcagttttactatgtgtaccaatagatttgttttcttattttatagcatgaactagagccttcaaaacaaatgttgaaaatagtggcaatagtagacttcttatttcattccaaatttcaatggtaatggctgtggggtttggtagtcattaacatattaaagaattttccctcttttcctctcagagtaggaatggctgctgaattttcttaaatgctgttgcacatcagttgatatggtttcacatttccaattttagttgttaatggaattaattacaagtattgctttcctaatgctgaacctccttacattcctggaatagattacacagagtgaggatgcatttttcttttaatatactgctgagttcagtctgatgtcgcctttatacacattcttctcttcttagtgctgtttccaggcagtcccctcaggctttggtcttccctaaatgcagagattaagaaatgggtgccacagcccacccctctccactgaggtgggaaatgtttcccatctcaaaaatgaccccccatccacgggttcaggctagaaatcctcaagtcatccttggcatctctctcagaaagacccactgagtttaacctcaagcactcctgctctccttcctggccaccttcctggtccagccactttcgttgcccatagccttcactgcccaatagtctcccacatctccttcaggtcccctggatctattcagagcagtctctgcaaaacccagaactggttaggccagaactcccttcaaggacttctggttgcccccagaataaagacgacattccaggatgtgacctatagggccctggagtggtctcgcctgccacccagctgcaatttcagccctgcacctgccctcccttttatgctgcagccactagggtctcccaggcacgcatccatgatgagcttccgcctaccaaggctgcccccaggctgggccctctccctgaacacccttcctctgtccccatcccaattaactcctctgcggaaagccaccccattaggagctctcactgcactatgtgctgcccctacttcagggtggtggttttcatcccttgtttaggtgatcattgtgtgtgtttttgcccagactggaagctccaggtggcccagaccatgcttctttaggttcagccttgtatcttcagtgcctgccattcaataaatgtgtaaccaatcagtgaatgaactcattatcttgactgtgggctgatactaagattatgctagctttataaaattaattggagtgcttttcatgcttttatatggtctagaatattttggctaataaaatttgtttcttaaagataaactggaactcgtttgtgaaaacttttgagccttcttcaccttgcaacatttaaaacacttttccagcctacagaaaatttgacaaacactcttcaccccaatgcactgctagttactactttgtcacatttgctttctctctcatgtctacatgtgcccatgtaaactcttttttgttgttgaatcatttagatgtaaattattaacatgattttcactcttagatatctctgcactgtcacctcaaaataaggacactccaaatttctacaataagattatcacatctaagaaaaatatcgttgatcccataaaaatagctaatatacactctacatttcaattccagctggggactcttcaggtggtaaatgctttaaactttcatatttctgttatgattattggtttattctggttttttactctttcatgagataatagtgatgacatagttttctggaaaatcacctacttcctccaaattttcaaatttattaacaaataattaacataaaatgtccttaaaataaatctcttctgcatctgcaattctgttttctcatatttaatgttgcatatttttgtgttctgtccttcttccttttctcatgagtttatctatgagtcttttgaatacccaagttttctagatgtatgttaaaattatgttttaccaagcccttagatattctgtttttcccctggacctgatattttattagctttataattcttcctttcagtttttgatctttaatacatttagacatattttaagtacttgggtccaggtcttaccctgctttttctccatatagtagacagttttaccaacattgcctacaatttgtgtgtgtttgtgtgagtgcgtatgtttctgagctctctattctgttccatttctctctgtaattctgtctattgttgtattataaattccgatgctatattgttaggtgtatatatgttcatgatcattaaatactctccatttctttttccctggttggcacataacattcctctttatccctgaagctctcctgagcaactctagctctgcctcggccctcactccaccaacattcacagggtttgatgtccctgtcacttgtctctgctttcactcaccagacaccaccatacagatttccacctgacaaaaaaaagtaccacaagagcctacaggaggggtatggctttgaggagttggtgaaagagtcacaaaatgggagacatttgaaccagtcctgaaatagagatactttgtaaatctccatggtaaggagcccaggattaactaattaatttcatgtcaaatagaacctaatgcccagcttatctccaccctctgcttttcctcttaatcacctcttttcactagactgaaaggagtggtactataaaatagcattcatcatattgaaccaagtgagtaaagaaaaatatgctggacataaactgagtcccacactctcaggaaagctacccccttttccacgggtccaggactgcctgctcagagcccatgagaagtatcctcagagaaagtgccttcatttggaaaattaatgatgctctcacatttgctagtgtgagggttaattttatgtgtcagcttggctaggccatgggacccagatatttggtcaaacatgcctggatattgttgtgaaggtattttttagatgagattaatatttaaatcaggagactttgagaaaagcagattatctccatcatgtgggtgggcctcttccaatcaactgaaagccttgtgaaaaagattgacctccccatgaagaagagggaattctgccagaagttggccttcagattcgaactgctgtaccaactcttgcctggatctccagcttgctgaactcacctgcagattttggacttgccagcccccacaatcacataaggcaattccttaaaataaatcactcatatatgtatacacacacacacacacacacacacacacacacacacacaaaggaagtgggtgattttccagaaaaatatgtcatagatagatgatagatagatagatagatagatagatagatagatagggccgggcgcagtggctcatgcctgtattctgagcactttgggaggccgaggtgggtggatcacctgaggtcaggaattcgagaccagcctggccaacatggcgaaaccccgtctctactaaaattacaaaaattagcctggcctggtggcatgcacctgtagtcccagctactcaggaggctgaggcaggagaatagcttgaacccaggaggcagaggttacagtgagctgagattgcaccactgcactccagcctggatgacagagtgagactctgtctcaaaaataaataaatacataaaaagatagatagggcagtgcttctgaaattattttccaacatacacgctaaggtagggcggggagagtggaggaggtggaggaagaggagggggttgaactgagggtgtgaggctcctggatcttgacctcttcacaaacagaggagttctgcttttattattatcatatattggagttctacgtaatgtcactttgggggaaaaagattctcctaaattaaagcgtaaaagcctggaaaccactgttctagggaatttctttttttttttttttttttgagatggagtctcactctgctgcccaggctggagtgcaatggcacaatctcggctcactgcaacctccacctcctgggttcaagcgattctcctgcctcagcctcccgagtatctgggattacaggcgcacgcctccatgcccagctaatttttgtatttttagtagagacggagtttcaccatgttggccagactgatctcgaactcctgaccttgtgatccaactgccttggcctcccaaagtgctgggattacaggcgtgagccactgtgcccagccctctagggaatttcaatgtgacctatttgatggtaggatctgttttctttttgcttttttttttttttgagacagtctctcactctgtcacccaggctggagtgcagtggcgcaatctcggctcactgcaacctctgcctcccgggttcaagtgattctcctgcctcagcctcccaaatagctgggactacagatgcatgccaccacgcccggatcctttttttttttttttttttttttttgtatttttagtacagatggggtttcaccatgttagccaggatagtctcgatctcctgacctcgtgatctgcctgcctctgcctcccaaagtgctgggattacaggtgtgagtcacagtgcctggccgggatctgttttcaatggacccccttccttcagtaggttgagacatgaattaggcatttatttactgttttccacaatattctgctctataataatatcccataaatttctatgagactctttagtatgaactcagcccagacaaaccctttccaaggactcagtaaattatgtcacacttgcaacttaaggagggccctggagtttctctttgaagattctgggctctgccacatttgtccacagtcggtctgatgtccatgtgtggaaggcaggtgtggagtggctgagggggccacgcgctccaggaagacagaaggcagctactgttggcgggggaggggtgggtaaagccttcctgcatctctagctatgacatctccacaggcaaaactcccctgcccccagcgcaggtcatcatttctacaatcatttactgctggagacaaaatctccaaaggactgactcaacagtatgttctcttgcagagaatcaagggaataggggtaagaaagaactattttttcctccttttccctcaatcactgacttttggcttatttcaaataccaacatctgcatcggtgcaagcattcgaccgagttttcttagctcgttagggaaaggaagccgacgttcagttggcgaggctttctggtctaaaggcacaggcaagggagtgttggccatttgtctcctagacgaccaggcggcctcagccacggtggaggccaccggcgcgccttcccctcgggttcaccaagcctgtcattttcagcctgcccgaggcaaagcccaccctacccagccaagcatgttcttaaaattctttacagattaacccacgtgaatctaaacccggtagaggcaaacgctttcccttccactgtgagctgcgttgtaatttaccccaacgacctgttgaaaagaccaagggagcttagcaaccagccgtccccagggccccggggggaagctgcaattaccgggtgcgaggccggcggggccgcagcccccacttcaaaggcgcgggaggagccgagggaggcggagctgtaattagtgcgggccccgccgggcgaccacgggcctgctcacgcctcgcggcctccgaggagcaaggaaaggcccgcgtgggagcgaagagccagggaggaacaaagacgcctcctgtttgatgtgaatcacccagaactagggaagggaggcgggcgcacctctcccgcccagtccctgcagagtcagggcgcagaaggaagcctggctcaggggcgatggcgtgggacggcgaccccgccctgcccgtgctcccccagcgcctgaagcaggatggagatgccctggtctgcccccggccaggctccctggaccctttgggatctgcggacacagggcctggactggccacatccctgctcccagacagagcacagaccccgctggggcccgccctgggtgtccgcatagggagggggctggagagcaggagcccccccgcgccgcgcctaaggggaccaggagccatggggaggatgctgtggggaagcttccagaaggacccacccagggagacggaagggtgggattcaaggtggccgaccaccagccacctgcctgatggcttgttgatcccagactgcctccaagtattctggcctccatattggtgtgctacgcttgttatcttaaggtgtttttaaaacccggttttctaaggacacagatgcaggatgtgccctccggcagccaggtgctgactggggctcagggtctgtgtgggtgggtgcggctgtgagtgtggacgggcgtgtgtgtaggagtgacttcctagaatgaatccaagaggagcctctttggggaaggtggtggggccaggtgggaaggctctggctctgtggggaaggtggtggggccaggtgagaaggctctggctctgtgcacatttctgtaatatctaaatattccaggtttcaatcatgaattacttcttttctagaaggaccaaaagggatcatttgcgattatgagctatttttcttcttatgattttctagtacatttttaaaaatctgataaagtggacaggcgcagtggctcacacctgtaatcccagcactttgggaggctgaggtgggcagatcacctgaggtcaggagttcgagaccagcctgaccaacatggagaaaccccatctctactaaaaatacaaaattagccgggtgtggtagcgggcgcctgtaatcccagctactcaggaggctgaggcaggagaattgcttgaacccgggaggcagaagttgcggtgagccaagatcacaccattgcactctagcctgggcgacaagagcaaaactccgtctcaaaaaaaagaaaaaaaaaagtcttaaactaggactatgcttttggagcatgtcgcagggatctgaggcttggggtaagcgtcggagactggctcatttggagcttttggagcatgtcgcagggatctgaggcctggggtaagcctcggagactggctcatttggagcttttaaagcgtgtcgcggggacctgagtcctcacagactggctcatttggagcttttgaagcgtgttgcggggacctgagtcctcggagactggctcatttggagcttttggagtgtgtcgcggggacctggggcctggggtaagccttggagactggctcatttggaaagggctcaccaggctgcagtcactgtgtggacttccccaagggccaccctgtgccctgcttaacattttgccaaagacagaaatggcaagttcaaaaaagtgaggttgacaaagtgaagtgataacccacagaatcaaagaaaatatttgcaaactatccatatggcaagggattcataacccaaatatatgaggagctcagacaactcaatggccaaaaaaaaaaaaaagcagccaggtgcagtggctcacacctgtaatcccagcactttggggggccaacacaggtggactgcttgagcccaggagtttgagaccagcctgggcaacatggcaaaaccctgtctctacaaaaaatacaaaaattagccaggcgtgctgttgcacacctgtggtcccagctactccggaggctgaggcgggaggattggtgattgattgcttgagcccgggaagcagaggctgcagggagccatgactgtgccactgcactccagcctgggcaacagagtgagaccctatctccaaacaacaataacaaacaataatcatccgattaaaaatgggtaaaagatgtgaacagacttttctcaaaagaagacatacaaaggccaacaggtgttttaaaatatgctcaacatcactaatcagcagagaaatgcaaatcaaaccacagtgcattaccatctcagcccagtgaaaatggcttgtatcagaaagacaggcaataacagacgctggtgagggtgtagaacactgtgggtgggaaggtagcacagtacagcccctatgagaaacagtacgaaaagcacaactaccatgtaatccagcaattccactactggtatttatccaaaagaaaggaaattagtatgtcagagatctctgcactcctgtgtttattgcagcaccgttcacaatagccaagatacggaatcaacctaagggcttatcagtggatgaatggataaagaaaatgtggtaaatatacacaatggaatattattcagctatcgaaaagaatgaaatcctgtcattttcagcaacatagatggaactgggggtcattatgttaagcgcaataagccaggcacagaaagaccaacatctcacgctgtcactcgtgtggaagctaaaccagaggctcccgtggaggcagagagtggaatggcggttcccagaggaaggaggcggaggggcgataaaggagggaaatctaaacgtgtttctcgtcactgagctgtacgctttaaaatggtgcagatggtacattttatatgtatgttattcctcaatttaaaaattaattttaaaagcgaggttaatgttgcaaatgttgtcactgaggcacccacgtgtttaccttaaattgcgttttgtggcactcagggacaggcaggctatttaaaaagtgtgcattttttcagcttcactagaaatagaatttgtggcagtttgtggactttgtcacgaatcaagctttcctttgggaagatctttcctgtgtgggcttgggtgagtgcctttgcctgctggagggagggggagcctgcctcagtggtggtgggggctgtggggatggagtctttatcccataaggagctctcagtgtgcccaggcatctcatagggattgtacccaccatccccatggtgggctgattccgggtctcaccaacagccctcatgacccacctgctgggcaccatgagcccgccccagctgccctgcagatcacagatgccggaaaggctcccggtgcctgctcctgctcctgcagctgagcagccagccacacccgctcctcctccccaggtccacagccgccaagttctgagtcttccccaccccaagcctgtccctttctccaccaagggccagcacagccatctgggttgtccacaccaactcccctccacagtcctcattcctgaaggcacccctccctactcagccctgccgcctcttcctctaagggacccctcctggacagggttctcaaagtccagtgcacacaaaaccctgggggttccagcttgtgaggtcagcatgggctgggagtgccctgaccccactttgagaaacaccacagctccatccccagcagaggtgctggtccccccagggtccttctccatcttggagggacatgtgcccctcacttgctcctactcaggatctaggcctccttgctgcacccagcacagctgccctgaactccccctcccctccgccgcagcctcccctccgccgcagcctcccctctgccacagcctcccctccgccacagcctcccctccgctgcagcctctctggcctcctgtgaactgcttggctgttcctaagccttggtccctggaaaatcccagttccagctcagcgcccacatccaggtgatgctcaaatgggcccagcctcaactctcagcccacagagctcagaggacggctgaggcctctggtcagaagaccccaggcttccccgaaggaagggacacctcacgaggacagcctgtcaccacagtcctaatggacttccagggaccacagtgccagcgctttccatcagaatggctgacagtattagagatcatacatcattcatttgcctcacgaaccccgagggagtgcttgctccagagagacccctgggctcccagggcctggcactggtgacagtggcatgggaggggcacatgagccgggtggcacagcaaggcagcaccgtgaccctaggggtgctgtgggcggagaagatgggggcagtcctgggctgctgagcttctctgaggggtcatcgtccttcaggcaagtggcaggaagtggcccacaggcttccaagctgcgggagcagagtgaacaagcagcaggaagagctgagagtcctgggaacagtggagcctgcatggaggggacaggaaaggggatggagtccggggcagcagtgagagacccagaggacgagagacctggagacacctgcagccctgggagacgccctggcagccagggctcaggaaaaaccatcctcagagaagacacacgaggtcattattcagaacaagagtaggtagataaaagcatatcctttgggaggctaaggcgggcagatcacctgaggtcaggagttcgagaccagcctgaccaacatggagaaaccccatctctactaaaaatacaaaattagctgggcgtgatggcgcatgcctgtaatcccagctactcgggaggctgaggcaggagaatcatttgaaccccggaggcagaggttgtgttgagccgagatcgcgccattgcactccagcctgggcaacaagagcaaaactccatctcaaaaaaaaaaaaaaaaaaaaaaaaaaagtatatcttggcattagtgctattctcagcatcagaagtcaaaatggcaactcattaagcatcaccaccagcgatgtttgtggtgggagagtggagaccatagacccccagcattgataatgttggtccaagtaaaatgcaagaacttcaaatgcaagggtcaaagtgtcccttgaataaccgcatttttctcgggtagaattccaaattacagcgagttcatagcactggtcctgccccgccacgatgacccacttggtgttgatggacgagaacgcgcttgtgtcttactcgtgcagtttgctaaactaacaaccaaaaggccatcgcgcccttacagttttattccccgctgacagatttgaggggagctgtcaggtgggaggcttctgagagcattctagcctattacacccagcaaatagattacatcacttagacatacgtttgcttttaaaaataactttatttttcctacgacacaagtaataataggttccttgttgaaacctcatcacatatggatgacaaaaagtaggaatgaaaactgatcacaatttcactgtcagagatagacactgagcatctcggcaccgtgcagcaagaatgtatgtagatacccatggtagataaaaaatatatgatatatgggcataaaacatggactgtcccgtcgtcttctgtgagccgccagcacagctgatgatgtgggtggcacaggcattgagtcaccactgggagtggccgtcatccctctcctgaagagacgggggatagggggcctgtggggcacctggggatcgtcccctcctccacatggcctgtgcagctggtcagagtgagctcaccaggagcaccggctgctcccagccctgggcccccttgagttctccaccagcaccccgcccctgcgaatatgcacagatcaaggggacagggccccgctgggccacaggctcaggacaggtgaccatccaagagggccgggaagtggagggtgctgcacactggcctgctggcccagtatcacccgatctcgtgtctgcctcttgagcgctgatggtgtgcgtctgtgcccctcacaaaacagcactgcggtaagtccaagacacaagcgggccaaagactcaaggcagtgcagaaggcggcacgtgttccaggggaacacggcacccctgaccatagcaagaggcacaggaaagcggcctgcagcagggagggggcggagagcctggtgtcttctgcatcctagggagccaggctgcctgtgccccagtggcttctccataacttctgggttctgtggatgtcccctgcagccgggactcctgaccgaggcagctccgtcagggtccaactgattccccgcacattgggcaagaggtggttcctaatcacacatcagcttcttgatgaccgttagtggattttggctgctgtaagaaaataccactgactgggtgtttcaacaacaagctgtgttcctcacagtctaggggctggaagttggaggccaaggtggcagcagggtcgggttctggcaaggacactcttcctggtttgctcgcggctgtcttcttcttgcaccctcatgtggcagacagagcaaaagtgacagcatgctctctggggtctccttcataagaggaccccatcatgagggccacaacctaatcacctcccaaacgccctgcctcctagcgccaccacaccagggttagaatttctatataggaactctggggagatgcaatcggcccataacattctattcctgactccgaaattgtacgtccttctcatgtgcaaaacacattcatttcacccctccaaccccaaagtggtggctcgttctgccatcagctctaaagtctaaagtccaaagtctcatctaaacatcatctaaatcagatacgggtgacactcaaagtttacttcctccctagctgtgaacctgtaaaatggaacaagttacatgcgtttaaaatacaatggtgggagagccatatgacagactttcccattccgaagggggaaatgggaaggaagaaaagggtaacaggtcccatggagcctggaccccaatagggcaaacaatgttaaatcttcaggctcaagaatcatcttctttggcttgagcccctgccctccagacccactacggccatggtcctgcccctgcagctctggggggcaggggtcatgcctgcaaggctctgggcagccctgcccccaaggctttgggcagggagcatctggcctgttgctcccagggagcagctgcccatgtggcagccctgatggactctaaatcaccttctgggtccttcttcccttgtcttgaagaatagtgcatgttcacagccaaatagctccctggtcctgctcggtacaacccaagaggtcagacggccaaactcacttccttcccctctctcccacctttggttcaagctgagtgttcctgccgggacagctggttgtgactgtggttcacacccacacaaatccccttatcagatggtcatctggctatgcccttaatgttctcttccaaacacacattctcatttttttacattatgcataggctgaggattttccaaatctttaagttctggtttctttttgtttaacagcttggtcttgaaatcatttctagcttctcacattttaccataagcagccaggaggaactaagccgtcccttcaacactttgcttataaaccccctcagccaagtatcgtgtttcattactcacaagttctgctttccacacaacaccaggacacaaacatagttcggccgagttctttgctgctttttaacaaggtggcctttcctccagttgacactagcatgttcctggtttccatctgagccttcccatccagggttctgctcacgatcccctaggcgtcctctgagaagacagaggctctctctgcagtgcttctcttcttgctgagcccgcaccagaatcacctttaaaaagctgttcgtagccatctaggctttttctagcatgtggctccgaatgattccagctgcccccattcatcagttccaaggccacatccacattcacaggcgttggttgcagcagctctcactcctcgcactgatcttctgtcctggcttgggtgccgcaacggtgcctgtagactggatggtgttcagaaaacaggcatttatttcctcacagtgctgggggctgggaattggagaccagggtgccagcacagttggagtctgttaaaagctctcccaggttgcagacagctgtcttttcactgtgtcctcacacagtggaaggggcaaggcagctctctggggcctcttttatatggacacgaatcccattcacaagggctccactcttatgacctcatcagcccccaaaggacccatctcctaataccctcaccttgggggttatggtttcaacagatatatttaggggagacacaaacattcagtccacgacaatgaccacaaaacccagattttaattcagtgaaatccaaacaacatggcaagactcctcacatcaagatgctcaggttttatgtcacatggaaagctagtcacagccccatccaacacaagtcctatctgcaaaatgctgacaacctggtggcaagaggacggtgagggaaggagagggacaggcagggaggaaaggcaggctccacagaggagatgcaggtgaggggaaaggagcactgggaatggctgggcgtgagactcggagccaaatacacagcagtagagggacttctgcccctgcaacagtgaggaggcacctgcggcctggcacctgcggcctgggcatgggagctcaggaagcagcagcaggcttgggagatgcctggagctgaaggagcacagccgcggccggggcccagaccgggcacgtcctgcagggctcagcttcccccagcacagctcagttttaggaataggataaagtggcattaaaagacagaagcaagatgggggtaaatgaaaacaaactgtgtttaccacacttctgacaccaaatgtgtgggtttccataccaattctccaattctgcgtcagtgccaatggggtatcccgcaatctaattcagttctgacaccaactgaccagggtcagcacagacccctcaggctgagggatgggcccaggaaactgtccccactccaagtgccaatcacaggtcccggggtgtcatctgtccccagtacctcggctataaattgggagttcccatgaccccctccttaggttcaataatttgctataataattcacaaaactcagggaaacgtcacttctgtttgctgggttactctcctaataaagggtgtgctgaaggacacagatgagcagcaggtgaggggtgcgcagggcaaggcccagagggaccctgagtgcaggagctggcatccgtggagccccggctgccccgccctcccagctcaggatgtgttcccagcccggtagctctctgcatcctctgtgtgggggtttgaaggagcctccgtgacgcatgactggtgaagttagtgactcctggtgactgactcagtccccaacctctgcacggaggtcacaggttccagcaagtcccagcctcgaatcctgccttggtctttctgccaccagcaccccattctgatgctgcctaggtccccgcctccagtcatctgccttaatctttctgccaccagcgccccattctgaagctgcctagggccccgcctcctgccttggtctttctagccaccagcaccccatcctgaagctggctagggccccacctccagtcatctgtcttggtctttctagccaccagcaccccatcctgaacctggttagggcctcacctccaggcatctgccttaatctttctgccaccagcaccccattctgaagctggctagggcctcacctccaggcatctcatcaacaaacagaaaacattcatgtctcccaagagtccaagggtcttaggagctaggacaaaatattgtaacacgtgatgtttctctcaccccatcgctcaggaagttacaagggctttaaaagctccatgccaggaatctgtttctgattatgccacggggccttctagtaccggggcagaggctacatccaggctactgcacggctgtgtttctggaagagcagatccatacggagtgtgacctgactcttgggcaggttttcggctgtctctgatggctgtgcctgccctccctgcccctggagctgggcctggcagtgggtcttctgggtgggggcgattgctggctcttggctctgactgcttgcttcctgggccttgggccatgggcagcagagactcagggcatggggtactccctccccttgagccttgagtaacttcaaccctccttggacttgcaacatgcaaaaatagatcttggctgttttgacccacagggatgtgggctgcacgttatgtgagctgaatggcgcatctgggcctgtgtctcgtgactgactcagctgctttggctcttggcctcggagtgtagggtgcccggcctcggagcattacccccgggaggtaaaacccttgtggggtcaggacatgtcatccatgagaaagtgccacgtggcctgaagtcagcatccccacacatgctgtggctctctgtcctctctgaatgtcactgctcgagatagggcccggcttgggtggggctgcaggcggggttaaactgcccctgggtgagagggaagagcaaatcccttcacttcgctgggcttccatttcctgacccataaaatgggaaccctgctggtggccattgccctgcctccccgagttcctacaaagcaggtggcctgggtctgggctcagccccctccactgggccaggagataatgccattagtgtaaccacagcagtggccactcccaaatgccactcggcccctggaaactcagccttccatccaaaaggtccccgaagtggggagcggcccctcagtcattccacacagcaggccccacccacccccccgtgccggggatacacgtgctcagggcacactccatatggatctgtcgtctgcctcgatgacttttcacccacacatgggattcaaggcatgatacgggtctttaggacataactgtttaattcctgagcttcccaaaactcggaggtttgggagaaatggggctggagctagagcaatagccatgtgccctgtggactctggccagctcttgctgccatcccgcctgccccggccccgtcctcttccaattcccgtttacagccctgccctccgtgcctgtcccaggcacctctggcctcctcgctgtggcccatgccaggtcattccctactgtcagagcctccctctcccaaccccaggccccggctgcagggagggtgccaacaggagggggcaggacaggagaggccccatccccggaaatgagaccagagccgctctgggaatggccagggctgcccggcggcaagtcacgagcagggcgtcactgtcccagcgcggcttcccagcctcctgcaggggccagggttggggtgcattctctgtcttctcagtgaggacgcgcaaatgttccaggatggaagataaatgttcaggaaaacgaggacccagaaattcttcatgggctgcatgagccctgaggcccgactggcaggccactgaggtcacctgaaaaactggtgacaacgggcgggctcagcggctacccggggacaatcacggcaggcggaagagcggcactggcgtggagctcccaggctctgtgaggctccaggcagcgccctctccagccctggcagccaggctggggtccccagctcccagtgtttacccagcaggccctgccttctgacaaattaactctgaaaggcttaaaaagtgtgccgtgtgctttggctctgacctaagatagacgacacagcagaacacacagagggtgtcccacttgaggagcctccacacaggcagcgaggtaatccaaagctctgaattccaggtcaggcccacgcaccacgaggagagaggaagcagatggtcctccttgcagggatgtgtcacgtcctcccacaatacacagggtctccatcccccaacggggtcacgggtgctccctgcagggtgcaagacagtgtccttccttgtggtctaggctggagaaaggtagacttcaggggagaagagctggttcctctcaaggtggcggccagctgagatgtcaggagtgccagtgtcctggggctgctgtgacaacagccacaaaccaggcagcttaaagcaacagaaaagtcttgtctcaggcctggagccagaggtctcagatcaaagtgtcactgggccgcactgtctctggaggctccaggggaggatccttcctgcctcctccagctcctggcagctgtggtgtttcccggcctgtggccgcatcactgcaacctctgtctcccttgtcatgcggccacctgctgagtctctgtctccacacgaccttcacataaggacatatgcctcttgggttagggccaccccaatgacctcacctgcacttgattatacctgcaaagaccctttttccaaataagggcatattcacaggaaaaagacttcagcatcttttttggggtggccatgcagaatcatgggtgtttctgtgggccactgcagagggcctgaagtccagcctgtcagtggtgagctagggaaactgaggcagagagatccagaggattctttgaggcacagcaagctggagaggagctgggcctgctcctggccggatcctctggggctctccagaagcctcgccttgaggccgtcacaaaatccctgtcctgttgccacatccctgggtaccccaggcccacctgacttcccactctgtcctagccagcagcagcagggccgttgcaggctccacatgcttccagggcaccagccctccccgagtgacacccccttctcatcatctgccagttcacccacacaagagtacacaggaggagtgggcatcttttttagggtccctctggcaaagctgcacaaggttcactgagatgatcatttacagtaggctgcatgtccagaggccaaggaaatagcctggtgggaacaagttagcaaacacggtgaggacaccacagtccagctgaactcacagagcacgggcaccaggccaacatagtgagtgacgcagctgccctgactgggctgggcatccatgggaggggcagacactggtgcttagcaaggacctgcagggccctgtaccctgagataaatcacagctccctcctgagagcccttctgggtgtcccccatctgctgtggggccacagaggccatgtcatggtggatcatggaaacaaacgtcccacagaggggaaagcagagagagatggggcagctgggatgcagcaagcaacaggccaagcctctctgagaagggacttgatgcagaggccctctgcaggggacaaagttgaagtttccagagaacagccaggggaggggtggggtggagggcagggggagggggaaggacaggtgggggctgggcaggtgagcaggggagggacaggcgagtgggggcaggcttcatgtgttttgtgggcagggaagggtgtctgtgtcttactctggtgtaacaaggagccagggagggtttgaacagggtggggtgcatgatctgagcaccagggagaggagacttgggggcaaaggtgggagcaagagactgttgggaggatctaggatatcctggagaaatgatgcttggataaaaataacacattttaaaggctggacagacagagctgaaggaggatgagatgtggatgtgagggaggagagcaggcatggggagccctcttcccttacacaccactgcttggccaaacagcaggcagaacaaaggatagggatagcctgccactgcgtggactctggtttttctcccactggtcaaaaatgcagcgtgaagagtgatttgggggaaaatgaatttaaaaggtgtcatattccaaagcattttgagtaatagaggaagtttcttccaaatggatgagggaaataaatgatttcccccaaattgtctcccctctcagcccagccctcatccattaaacaggcagcctgcttcttctaacagcccacttgaacagtggagtttgaatccaaagatggaggaagaacctcagagcatggaagacaagagactcagcctgggcgtggcagggagggcttcctgaaagacagggtgcataagacaggttttgaagaaggggttttggggtggaaaaacaagggggacaggagtttcaggcagagaacatgctggtggatgccagagcatccaaaaaggagagtgcaggagattctcaatcaagatatgctcgcaaaggagccgacattcaccagaaagctcattagaggccttaagagctcaccacaaactgtcatgaaggcagaaccagaaccaaatgttttctttgtttatgaaaggcaacatggctcttatgcacctggtggaatgtacaagtcatgtttatttgggggcaatctctcagtatttaaaatggcaatacctctgacccagtgattcctgtttgggactttttttttatatatacagatttacctccacatacatataacaacatgagaaccaaaatattatggcagtgctgtttaagaacagaagatggaaacaaattggctgtcaatacagaggggactgagtaaaggttgggatgccaattcaagggacactatgcagccactcaaatgaagacgatacatctggacattttccatgacacaagatcccagatagatcattaagagaagcaaagatggcaaacaaccatctttcgaaggatgtatgaatccagcagctggcagaaatggattggaggaagtcatcatcactctatgcaactctaaatcatgttcccgcatcgctactcaaaatactcaatctgagtcaaggccttggtctggcaagcaccagctaattgggctctctgtccttcctgcagagacctctgagcagcagctgcctggtgtcctccacaggggtcagcctctgacctgggaaaccctgacgagccttacctttccactcagcacacatgaaatcaagaggaatacaccatgtttccaagctttctcctgtcctggagccaggagccccaagtcccctgaatggcataggccccaaggccagccaggcagctgttagcaggggaaagatgagtgggtgctggacaggccaaaaccatatacatccccacagaggcagtggcaataatcccagtgagagaggagcaagaaaggagggacaactataccagacttaagagatgcaaggggagtgaatcgatagcaaccttagaaaaaaggtcttcaaccaggggctagccccactctctcaagggcatgcagtcctcagaggatccaggcccaagagctttaagagacatattattttcttgaaatgtaaagtgaaaagttggcattaaaaaagggatgttgaggccgcaatagggtgctctgaaggtagagtgggtacagtggctgttatccttaactgctccttttctagcccctgcacttgccaaaaaacacatttctcctggggcagtcctgttcaagcaatgacaatgtaggaagaaagcaaagatggcagtgtagatcccaagtccatgtaggagacacctgggacaagcttcagtgtccctccctctgtccatccacctgcccagccatccatttatgcatctattgctcctagacctagggtatcatgttacccaaacagcatgctgtgaaatgccgctctgcatcctctctgttctgggccatgagagctccacttctgcccctgcacctcagccccaaggtcagttgtatatttgtagcatctcaaggaggaggaagtgggaagtttcacatttccttctgatggaccagtaataaatctttaaggaaaaggacacacatcagaactccctctccctctctttcttcctctcccccatctctcagagcccagctgccatgtaaaaaagtccaggctatcctgctggacaggccatatggtacagaactaaagcacaaactgactgccagccctgtgaggaagctttcttaaaagtgacactccttttaaacactgcagatgatgcatccccagccaacatctaactgcaacctcataagatgttctgaacaagaaccaccaactaagcttctagtccctgactcctagaaactgtgtggcataatacatttggctgttttaagctactgtttggggacagtttgttacacagcagtagactgtagtgcatactataaatccagagtcactttgcatttggacacaagtctttcttcttgctgcccagctgctatgtttccacttgtccattcggtcctatcagtcctgacttgacttagatcacatgaacaacaacacaatgccaattctagcttaaataagacatttagcacagttttcaaaatactcatcctaagctccagacttattaatggccaagacattattatctctttgctttttaatttctgcagggctcagtttcattctatcacaaaatgatgacagatgcaggaggcaggtaagtgagggtccccacagaatctccagcccaccccacaagtgtttatatcagatacttttgtgtagatgagggaacctgcccagagtcttgtctgcacatgcttgcaacggactgggggcccccctgtgcactgggagaatggggtggaggcatgggaagtgcatgccttgtgcagcggggaggagcctggcctcttcggcttgtatgtggtggcctggaattcaatctgtgaggtgcgaccctgttggcaggacctcattttatttttgccaagagctttcttttaataaatctcacctttcaacatgtccacgtgcctaattttttcctggtaatgggacaagaacccaggttttagctgagctaaggagtaaaaatcctgcatcattttggtggcccatacagggacacgagcaaaggtgagtaaatgcggaccaaaacatctttttcccttttgtttttgagcctatttgtcctcagacttcttctgaaggtaaaggaaacaggcccccacccttgccactcccaggggtcaagaatgtcggcctcggtccgacccagactttctatggcattttccttcattgtttgggacagatgggcaagcggcaactccccgcccgcctggcctcccctcccagctggggctggggtgcatagctcaaaggctgcatgtggcaggctggccagcattccccaccatatgtccatggtgtctcctcattccatgactgaggagtccagctccattcaagccctagggaagaaacagcagtaagtttctctccctgttggaggaaactatttgtataagaataagaggttctttcccaaggcatctttccaaccctgcactttaagctttttttcttttctccaccaggtcaggagttaacttttaagtgagagggtttttttcccccttttagaaagcactttagtaggccagaaccctagctatcactgtttttctctgtaaagttttaattatgaaaaaggatttgtaggccagctgcagtggctcacatctgtaatccctgcactttgggaggtcgaggtgggtggatcacctaaggtcaggagttcaagaccagcctggccaacatgatgaaatcctgtctctactaaaaatacaaaaaattagctgggcatggtggtgcgcacctgtaatcccagctactcaggaggctgaggtaggaaaatcacttgaacccagaaggcagaggttgcagtgagctaagattgcgccactgcactccagcctgggcaacaagagtaaaaaactaggaaggaaggaaggaaggaaggaaggaaggagggaaggaaggaaggaaggaaggaaggaaggaaggaagggggagggagggagggaaggaaagaaggaaggaaagaaagaaggaaagagagaagagagagaaagatgagagagaggagagacagaaagaaaggaaggaaggaaggaaggaaggaaggaggagggagggagggagggaaggaaagaaggaaggaaagaaagaaggaaagagagaagagagagaaagatgagagagaggagagacagaaagaaagaaaggaaggaaggaaggaaggaaggaaggaaggaaggaaggaaggaaggaaggaaagatttgtgagttggtcttaagctacagccaatctggtgtgctctgcatgtctttctgtatggtcagtagcaaactttgctgcaggcctccatcttgttttatgtccttgggagcatgacctgtagcgacatggcagtgctttggtttagccttcaccattttacaatggcggcccaggtccaatcctggcttagggaatgagttctttctggtttgatatctacatgacctttgccatttgttgattcccttcccctccacaaactgccttggattttcctttctctgaaccttcagaaaagtttgaaagccagaaatattggccgcttggcatggctaaagctgggtaatgagatttaaaaggattttattaaagagcactcagcttaattaaaagtggatatccaagttacaggtatatttaaaaggcctttgtttttctcttcttggatcttgttttgctggaaagaggttttttctcagtcaactgaattatttttctccattttgccttgccactcttaatgcacacatgaaagatgagagacctctgatttcctcatggagccccaggaattagaggcagatggatccctctcaaaatctgtttttgtctcccagctatatttgcttatgagagcctggaaactgcatgttttcctagtcttgctcttaaagggctccacccagaggccaacaatccaattatgaaaaatattatagctactgaatcttcttctgcctgtgtagttatatatgtgttgtgtgtgtgatgtctattaaaaaagagctctaattaattgacttaaggaaggataagcacttggatcaaatattttttaaaggtaagataaaagctgtggtaccttttagctcacgtgactttagtttatggcttttccataaattgagcattgaaataaaagcccaaaagggttctcttaagacactaatctgctatctagcaaaatttgtaaagggttataaaaagtttttgcttcttaaaaaaatgtctgagtcatcattttggtgaaataaataacttatggaaatctggaattctatttcataacatcaactctttaaacttctaacatatttgacaggcttcccaaaatcaaattcctgtttcaaaaattgtctttcctgatccctggcttttggatgccacagagggcccctggagcacccagaagagaggtaaacaggattacctgacacagttaggtacatgggattaccaaaatgatctttaatattcctcaggttatattttagggaataatattaatatatgttccaaagttgtatgggatttctaaaattctaatgtctgagtatatgctatcgatcacaattaaggttgttaagttattgtaaactatggagataaccaaatgtatttgtcagttgtgtttctgactgtaactaccctggacattttgttattcatagacaattgttgtcttgttttgatcctcttcaaaggatggtttataatcagctacagaacttcaccaggtgctctcaaatgcaggtttctaataattttggagattgtgacattagaataaaggaaaaatgtaccagactcatgaagagctgaaatgttcacaaatagcaagtaaaacaagagttaactgaaaggactgaactaatagaaaactgaagtaatattttttacttttgcttggaaaattgctgatccttttgtttttagagtcaaggaaacattttgagctatttatggcctttaataactaagtaaggtatactactgtgaacacaatttggaacatatttgtctctctctctgcctggcttctccgggatttggaaactagttgtaagtattcttaacttatgacaatatagttgtttgcatcagtgcaataagaatccattttcttttgcaacaagacacaattggagaaactggttgttttaccaaggctttgactagaagggtatgctcacctttaaggagtcaagctcgatttgcagagccaacaaaagacccttgggaaaactggcctcataactggtctacacagtccccatacagggttcctaacctgtggtgagtaaagcatgtcactttctaacaggtccaggaactccatgctattgggacctcaagaagagagttgtttacccagcttacaagtatttgagggtacaatctcagctttagaaaggcctatctgacattccttgtgaaacagagttccatcaaagcccatgtaaatctaaaaggcccacgttaaaataattatgcttgctgctctttatgcaaataatcaggccaagtataagactaaagtctgttttgcaaacaactcagtcctatcatgatttgtttttaaaaatgaggactggagagagacattatgtttcaaaacttatcatacgtttgtcattaaactctagactcattcgttgtttttgcgttttgcctacattttagactaaccctgcttattcctgtgaaccaaccagccatctccaactgcagctcagaaggaacaaaaggggatgggtaatgtaaaaatctggatccatatttaattctgagcaatgatcctgcaaatcctgccaggtgatgggaataaatatagtgcccatcacctggaggtttcctttttgtgaaagtaagaccaagggagctaaccaaagccaagccccatgcacccagaccttagcaagcataactatatccaccagttatcagggcatgtcacaggacatccttttctctcccttgttggaggaggactcaattccgcagcttcaccttaccattcagcctatgataaggagtccatgcaacctcctcgagacacatttttgtcccaaactcaatttcaacctttgggtcaaagccctagaaaagaaaattggatctgaaggacccagaggcagatgataatgaagttaaaaggcacagcacaggtgagtgattcctgcaggttaagccaagcctcccgtttcatggataaaggtcatgctagtatccaaggcataagcgaggtctaggcaattcagaggctactgatagcaagggaaataggacgaacatgggtgagagcagatactcccaccccctaggcccccctggtaacatgggtgaaagccgatttgacacccataggtggcaccctgttgtggtcactgggacccagggatatgaggatggaagaagaaagaaggttgcctcactttatctccctcacataccccaggtatttgctaggaagagaagggaacctgggatgcctcaattccctccttctagtgggtagccatccatcttcatctgtaccccttttaaatgcatcctgaccccctgggactcctttgaaaaaaaaaaacccttctttttttcctatctcttcctctgtcctgtcttcatagataggtaattgtgtctctgtacaatgggacactcccctcagatgcatcctccaaactgggaaaagttaatttcccaaaccttaaactggttggcttaggaccggactcaggggaagggatcccagaagagcaacatgccggcaaaagggtcaaggttttattttttattattactttttatttttttaaccagttgggtttttggcctccctctccttctacagtttgggaaaaggcctcaggatttttgagttgtccttaacccccaattatttcatttcaatacatgttttctaataacctagtttgtctcctctcgccttcaggccatcaaactccaatcggtcttgcaaggggagccttggacggtagccttctgctgggaacccttaaataggcctctgagggagctctgactgctgtttccccaaaacagtgcccctgtcagcaggaagcaattaagacttcgtccttattcttatccttattctaacaccaattagatgtacttctttagagggggaatgacagctgcaggagacagatgagggaagctgcccagggctttgtctgcacatgcccacaacggactggggacccacctgcatactgggaagatgcggtggagccatgggaagtttgggccttatgcacggggagccttgtctctggctcatgtgtggtggcctggaattcaatctgtgtggtgagagcctgttggcaggacctcttcttttgctgagagctttttgttagtaaattctgctttcctcacctttcagcgtgttcacgtgcctaacttcttcctggttgtgggataagaacccaggttttcgctgagctaaggagaagttgtgtatcgatgacacatggactgcgtgaatactacatggagtgtggacatgtgaactatggaaaaatcccacctaagcaggagacgcaatttccaaacaattacctacttcacttttcagtattttattaaatattatgtttgtgctgttagcagaaaaatcaaactctgtaaaattaaattttaaagagatattctgagccaacatggctgatgatgacccatggaaacacagtctcatgaggcctgagaaagtgtgcctgacgtgttgggttatggtgttgttgttgttgttttgagatggagtttctctctgttgcccaggctggagtgcagtcgcacgatctcagctcactgcaacctccacctcccgggttcaagcgattctcctacctcagcctcctgagtagctgggattgcaggcatgcaccaccatgcccagctaattttcgtatttttagtagagatgggctttcaccatgttggtcaggctggtctcaaactcccgacctcaggtgatctgctcatctcagcctcccaaactgctgggattacaggcctgagccaccatccccggcccatggtttggttttatacgtttcagggagacaagagttataggcaaagacatatatcaatacatggaaggtatacattggttcagcccgaaaatgaatgtgaaaggaaaatcaatcttggggccccaaaatcactaagctaaagggaaaattcaagctgggaactgcttaggttaaacctgcctcccattctattctgccgagaccagctcggtcggagagaccctaacccagcagcactagaggaattaaagacacacacacagaaatatagaggtgtggagtgggaaatcaggggtctcacagccttcagagctaagagccttgaacagagatgagatttacccacgtatttattgacagcaagccagcgataggcagtttctatagattacagattaactaaaattattccttacaggaaacaaagggatgggccgaaataaagggatgggctctggctagttatctgcagcaggagcatgtccttaaggcacagatcgctcatgctattttttgtggtttaataacgcctttaagcggttttccgccctgggtgggccaggtgttcctcaccctcattccggtaaacccacaaccttccagcgtgggcgtcatggccatcacgaacatgtcacagtgctgcagagattttgtttatggccagttttagggcaagtttatggccagattttgggggcctattcccaatactattcaaagtcatccctctgctcactgaggtaagtgcgtatctgattgcttcctttggaaaggctaatcagaaactcaaaagaacgcaaccatttgtctcttatctacctataacctgtaagccaccccctccccactttgaggtgtcccacctttgcttcaagttgtcctgcctttctggaccaaatcaatgttcatcttagacatattgttggatgtctcatgtctccctaaaatgtttaaaatcaagcttgctccaaccatcttgggcacacgtcaggaccccttgaggttgtgttacgggcaggtgtccttaaccctggcaaaataaaatttctaaaatggctgagacctgcctcagatatttggggtcacaggcagaatactgtgaatggggggcttagaggttgtaggtagattcagagattatttcatttgcaattggttaaaggaataaagctttgtataaaaatttggagcaggcagaaaagaatgtttaacatcaggaagtcttcgaaccaatacactgggtcagtgtgacctacggggtgtgtgacttaacccttgtctggcatgagcttaggtcctgtttatacttcgtcagttttggggcattgttttgagacagggtcttgctctgtcacccaggctgcagtgcagtggcgcgaccatggctcactgcatcctggaactcctgggctcaagggctttttgcgccaggaaagaagtatgtttttcaggtttttcttgggtccccttggccaagaggaggtccattcaattgttggggggcttccaattttatttttagttaacagtgcagtttgatacatttttgtgttaatatttaagggaaaatccagagaaaaaaataaaaacatatatttagcacttagatccttatgttcatagaattttttgaactttcatttcaattaatatatctattgtttgttgcaaatgagtgtgatgagcaacaaaagactttctggaatagaaacacctcttttacaaccgtgaggaagcagatcctctgtgtctttggaaaacgagatcacgttccatggtattctccgggccttcggtccttttactctccctggcccttgcagaaggctggcttagcggggtctgagtccactgagccctgtgccgccacctatgttagaccccgcagggcatcagcagctctcagggggccccagcccaggcctgagtcagcctctcggaggccaccagctgcgttcaccaggcgccaaggtcgggaagcacggctctagggcagagcctctcaaatgctctcccggaccagccccagggctatcacctgggaacgcattagaaatgcaaattctcaggccccacccagcccttcggagtcagcaggccgggctggggccagccctgtcttaacaagcctcggagtagctccgattctctctatggactgggaaccagtgctgcggcttcagggagaaattcagccacactgagaccagcaccgtaagccatttggaaagtgggggcagtggatgaggaggggcagtggcaggcaggggaatgaagcccaggttgacgagaaagagtgaaatttgagtaactgcaaggaaaggccaagaatcccacagtcagctcacggccttggacgtggctcacagacaggcagggggagacttcgcaggcttcagagggtgtcagggaccaggaccctggaagcaaaggttgggagcaaggaagcagcgcgacccctcacaccccacctggaggcctgggtcgggcctgggcgccggcacagagctggtgaacagacatccttgggggagctcccgctgcaagcactgcggctgcccaggcaggtcgggggagacccgggttcggcttctttccagacctcgcagtatttctgtgccctcacctggctgtgagccacaggttcagagagaggccaggattggggcaagggagcccaaggagaaggccggatcccctcacgggggtggccctggattccttggctgggcagagcgtcactggggatctccagacaagggacacaggctttgattaaggggccccagcgaggatgtctgttcaccagctccatgtcggcgccttgggcccaccgaggcctccaggtggggtgtgaggggtggcgctgcttccttgctcctaacctttgcttccagggtccaggtccctgacaccctctgaagccggcgaggtctccccgtccctgcctgtgggccacgtccaaggctgtgagctgactgcggaattcttggcctttccttgcagttactcaaatttcactccttctgggctggtccaggagaccccagcttgggacagggcctgtggcccctccagcagcacgcactgtgcccacccgccactggtgaggagattccaggagaaacactgccacccaagcagcaccccacatggctggcctccccgcaccgggccggcaccccacagtgccagtcacccaccccacttggctggcctctctacaccgggccggcaccccacagcgccagtcacccaccccacgcggctggtctccccgcaccgggctggcaccctgcaacgccagtcacccaccccacgcagctggcatccccgcaccgggccggcatcccacaacgccagtcacccaccccacgcggctggcctccctgcaccgggctggcaccccgcaacgccagtcacccaccccacgaagctggcctccccgcaccggtgccagcaccccgccgcgccagtcacccagagtcctcctgccccaggaatgaaaccatcctcaggccgggcgctgtgtcctcagtggtggtgtctagggatggggtacacagcccagcctctgcccagggctcggaagcccttggccaaatcccggctactccctgctccggcaggctgagcgatgcccgtgcatgctgagccaaccaaccaacaaatgtccctgccttgtgtgccgtgtgcatgccggggcggacggcctgcttgctatggatgtggggctccctgcaaccccatgaggccctgcagcagcctggctgtgtccccgcacccctgtgtgttggcagaggtcaacaccaccggacccctccacgctggccccctgcctctccattcccgcttcctccctgtgaacgtgctgtcataccgacccctccacactggccccctgcctctccatccccgcttcctccctgtgaacgtgctgtcattccgacccctccacactggccccctgcctctccatccccgcttcctccctgtgaatgtgctgtcattcccgcttcctccctgtgaacgtgctgtgccctaaagccacgcttcctccaaaggctgcactccatccgcccaggtgataagagtcgctcagacactgttgcttatacggccgcacacacatctctagctggtttcttgttccaataatactggtattttttaaaagcaaatttgattccttgatccaccgtggctgggtgttttgtaaaaggtagaattaaataccaggtgtgtgttagataattgaaccaagctcacaaggcacaggtcagtgagtgtgacaattgtcagaggcaggcagagaccgtgatggcctcggctcttacagagaacattccccaagggagcaaagcctggcaggaggcctcccttggaattcaccagaaacttcagatgccagttacaggggagcatcgaaaccgagaatgccgcatttatgcccaggccctcgcccgcagcgacctaaccccttccagaggctctgctggctggggcttgcacctcttccctgcagccgctggagatcccatgtctgttcctgcaccccgcagggtgaaccttcagaggcccagcgccagggtccctgtgctgctgagaatgaaacccgcccttgggggatgaagtgcctctccaccagctccggggtcacagtgtcgctaaaacatccggctgggctctgcaaaatggcgtcttgggggcacagcctcttcacagccacagggcctcccgggaggagcacaggcttctgggtgtgctctgtccctgggaccctcagctcacaggccaggaggtgggaccccggtggctgaggaaatggccacacgctccccatgtcccgtgcgactgctatggaaagaggtgattccctaaaggaaatgggggagggggcgccacccaaatcagggagaatgggtgctgtggccgaatacacaaacgtgtcgccgtagcatctcacaggccccacatccaaaacaggccccacatccattgctccaaacctgctcccggcccctcggtcctccccatggctccagccgccccctgcccggtgtcccactggcaagccctcgtcctccctttctccctccgccccctccaagccattggcccatcctgtggattccactccgaatccaactcagattaatcagcacaacctgtggactccactttgcatccatctcggatcaatcggcccatcctgtggactccactccgaatccatcttgagtgcacctgctgtctccctctccatagtgccccctggcgcccccgcccccacttaagcctccagcctcccagcctcccagcctcctcctccctcaacccgactcaccagcaagagggaccccttgaagacccgagtcccagcgtgcggctcctcaacctcctccagtctctcctcgcaggagggtaagctccaaacccccaggctgcccgacggagcccacggcaccagacttctccccaccagctctgcccaggaggcctctgcaggaggccccggcccactggctcctggacccctcaccctctgctcagcccggcctttgcctgtgatgctcccagaacgaccctttacagctactgcagatgggaagccccctcccccccgcccggggctgtgtgggttcatggggtgcgccctgggccgctcctcaccgcctggagcgctggatgctcccttcatccattttcacttgtgtatcgtccatctccccaaatccacgaggcccacagctgccgagcgttttctccactgttatcctagcaccaagcacaatgccggccacctgatgggtagtaaataagtgtagagagaaagagagggagagagggagaaacaggaaggaaggagagtgggagggagagaggaaggaagggagggagggacaaagggaaagaggggggaaggaaaagggaacttgtaaacttctaacatttaacaatttgttggcagattactgcataaagatgtgatttttggcaacaggagccaggaaatgctcagtgctgcttcatgtgctgagcctctgccactgcacatggcctcactgcccggggccgacaagctatgtgtgcatgcgagagtacatgtgtgtccatgaatgcgtgtgagcatgagtgcacgtgcatgtgtgagtgcgtgtgcacgcatgcttgtgtgcatgtgtgctgtgtgtgcacgtgtatgtgcatgtgagggtatgtgcatgtgtgtgagtgtacctgtctaaccagcaacagcctcattagattccaaggctgcgtgagtcacctcctgccacaggtaattaaaactggggaaaggcccgtggctttgaatggggcagatagaatctagccagataaaggaaatgattgcatctccaggtggctgaaggggaggaagctggactcattccgagtgtgactccaggttttcaagtgtaaaacacgaggagatgtcagtcgggtgccactgctaatgaggcagcccacaactggtctcgacgtgcgtctgtgcctgtaaaagatgaaagtgcagcagcaccctgagaaatcacacatcttcgccgtcagtaccgctcagggccccagctacctgttctgcgtgtctgtggctgggctgtgtagtagaatcccgtgtcaaagcacccaccctcagaggctcctgggggaggcccggttctgtccagcagcatgggagagagatggtgctgatgaagaggacaacacggggctgtctgcagagcacctgccacgcgccaggctctgtgtccacaagcacggcggctgctcccacatgacggagctcgtgcggcagctccaggactgtctggtgccagagccccagctctccgccagccccaggccactgtgcgaggccctcagtgaagagggggccgtggctttgactgcaggatgcacgggctcggggtcggtttcagtcaatccttgatttctcatcgttgcagcttctcagaggagtcagttcacaacgagcagaacagcttcctggagaatcctccacacaggaggtaaccatggaaaaagtgtctacatatggctctgatatgaaaaactaagctctggacttaaaacagtgtagcagtccataaaccagagaggtgaagtgaagagacccacctgagtgtgtgcagcagcagcccaggccgtctgtgccctcctcatgctgaagacctttccagagctcgaaaaacacgtctaaaacctcgtgaataccatcaaagaggtaacaagccagtgagcactcctgggtcaagacccgagagaggatagaaagtcaagagatgggcccagggtttggaaccgctttgctctggaggtatttgaaaacctgcaggaggcagctaagtaactgagctgagtcgcccatgacctggagaacaggaactgaggtctgcccaacaaaggtgggtgccccaggccgggcgcggtggctcatgcctgtaatcccagcactttgggaggccgaggcgggcggatcacgaggtcaggagatcgagaccatcctggctaacgtggtgaaaccccgtctctactaaatatacaaaaaatcagccgggcgtggtggcgggtgcctgtagtcccagctacttgggaggctgaggcaggagaatggcgtgaacctgggaggcggagcttgcagtgagcagagatggcaccactacactccagcctgggcgacagagtgagactctgtctcaaaaaaaaaaaaaaaaatggtgggtaacctgggaagcacctctgcctcatgccaggacccagaagggatgcattctaggaccagggtgagcagaatacaaattagcccttgcacagcctgcagcctggcttctaggcattcaggccaggaaaacatcaaacccagaaattatgttaaggcaatctccaaatactgatgccagcaggcacctagcagaagccatttgtaaaatcctatctggaagaaaataacactataccaggcctcaaattattttttatgaataagttttcaaataaaatgcccagaatataaagatgaccaagcatacaaggatacacaaccacatgaacaaaaactggccaaaacaacagaaaatagaccctcaaagactccagattagacatagatgtaaacatctgggcaagcttggaaattttggcaggaaactagaaattatgaaaagtggaatctgcatgtttgaaacactacaaacaaattgccacaaacttagaggcttaaaataacataatttattctcacacagttctggaggttggaagatcaaaatgagtgtccctggactattccaacatatttttaactccaatcccggaaggaaaggggagagaaaatggggagaaaggaacatttaaacagatacaagctggcaattttccaaaactgataaaatgcatcattctgcagatttgagagaccaagagaaatccaagctggatagataaaaagaaacaccatagtgaaactacagaaaactaaagtcaaagcattacagcagccaaagaaaactgcagacttccttcagaggagccacaggaagccgcacagtgttcatggaagccaagagacagtagggaggcatttccggtccactcccaatctacgatcccccaccacgcaaatgcccctggatgcaacccccattctttgtacagcagctgggttggtaaaatagaaacttcaatatcctgccacctgggggaccactcattccccaaacatttagaggggactgttctgtataacgggttaaatgtcttctgggtgacagagcaaggccctgtctcaaaaaaaaaaaaaaaaaaaaaagaataccatctagaccctctttgtaataatttatttgagaccctttgagaccaccccccccccgtaaaaattcaaattactttttaatttgcaaaatttatttaagggctgggcacagtggctcacgcctgccatcccggcactttgggaggctgacacaggaggaccgcttcagcccaagagcttgagaccagcctaggcaacatagcaagaccccatctctacaaaaaatacaaaaattagtcaggtgtggtggtgcatgcctgtagtcccagctatttgggaggctgagaagggaggactgcctcagcctgggaggttgaggctgaggcgagccgtgattatgccaccacactccagcctggacaacagagtgagaccctgtctcacacacacaaaaacatttaagaatgaacagaactggagtgatggagaagaagagggaggagggcactaatactgaagttcaggaatgtgggaaggttctagaaggccaatggctacagcaccaaagcatgctggaggagcagggaggtctggacaccaggcatgacccaaagggccccagatctgctttgcagggccaccagaccccacatcgaaccctgtggacaaacgtttctcttgagacttgtctgctgcggtttgccacacttactacagttaccacgggactgaacgaaggaggacaaatgcagaaatgaaaacttaaactgttggaaagaaggggtttggggaagaagaagagggctccctgcttctagtgagcaagggccaccgccgcgagcttctacagcccttcatatttattaggtagaaagagcagggaggaggaggtaacgatcggagggctgcttgattgatcacaggttcacattattgctcacaggcttcagatgtgcctcatcacaagaaacaccgcgcttgacgcgtaactgccctcagcatttcttcggggcagcagacgcagtttgtcagtttgccagcattctgcatttatgagaacagtttgctgtctactcatacagcctccagtggtatactgagtggatcacgaccctcactctttcggcctgcaacacttgtctagtcttagcatgtgatggggcctctgcttccctgctcccctcaacagctgtccagccgtcttaaggacacagtcaagaatatgaacaaagatagtgtttgcaatggttttcatggtagaaaagacctgactgccacagggaagactgatagggcctctgaggtggctctgaagtggggggccactcagacgcctgaatgccaactggagggaatgtgcgtagggcctgagaaaggctgagaaaggctgtgagtctgggatcaggagacgtgcagggctgaacgccgtctgtgccctggagtcggtcactatagtccatcggggccccatctcggcgccggagacaccagcagacaggcagcatgcaaaggctcccacttgcttctgaccaggcccaccctcgccacctctgccatccccagcatcctggtacagagcactgtgccgggtattaaaatataacatgtgtccaaagacagggcacgagatcagggcaccaagaagcaattatcagcagtgctgatccagaccatggatatattttagatccagctttttgctaacctttcttttctaatttctccaaaatgatcataaattgatttttcattgaaaattaaaaggcttttttcagtgttttgtctatttaaggagaggccactgccacggtccagctgagagagaacaacctagaatgcaggtggggtagtttgagaatcaccaggacatggggccatgtgttcaggcagggcctgatggggaagatacggggaccctgggacctgatggggcagctgggggtggtgactggagctccagccacaatgactggaccactcagacagtttgggacagggagggtagggagggcgtgcactgacgtttcaagaaaaccatgaggagactgtggagggaggcaagtgctggaaagcagatgcccagttggaatcccagagagcccaggtggaagaggcagctgaggaggggctgccaaagaggagaccacacagtagagagctggggggtggggggggggtcagaagaggtgtggagacggaaccccaaagtccctgaacgctgaagaccagcacaaggctgggtgaaatacgaaagcatcagtggaggtagtttaaagaggagcttggctgacagttcccttaagcccccagcagaagcaaaagcaaatggtctcgggggaaacacacctccaaggcatgcctggctcagaatggactgggcacacagagggaaggccccagtgtctggggggctggactcccttcctagaagtgccacgaggcagtggcagaagccccaccagcctgggtccctgagtgactctgtggaacagagcccctctgaagatctcactggactggttggtaatgaatgcgagaagcaaacttacctcaagccctaagatttgggaaccatttgcttctgcagcataagccaggcccactctgactgacagaaacatgtccccagccgggacccccacaaaaccatacgcaggccacaggtatttgccgcatgagtggccacaggcagcccggtgtggtccacaaacccccagggccagttcctgaggcccagcatggtcctgcagccagagggtgccacctccctggcctgtggggtcttcccccaatgccacccactcagccctcagggataggtggaaggggccagccagtgtccgaggcaaacccctcaggctgcactctctgccagtgcggagctccaggtacaatgagcgacaccctcagccaccaaggcccagctggggtgtgagccggcacccatgggtgacctcctctaccacctgcatgcaggtggacatggcagcagcagcctgatatgggggctgcagggaccccagctccccctgcagagacactcacctggtaaccaagcctgtgtaggctggcaaatcagatgattcaggtggctaatttatttatgacaaacaggctaaatgtaggttaattactttgtaatcattgtctggagggcacatggagggaccagaggcggtccacacacactgagtgtgggcaagtgagagctgtctcatggggctgctgccagctgcccggggccctgcaggctggaggtatctgccccgcggcaggcgccccaggagtgggacgagcccaggtggaggaacatcaggcgtcacctgtccagggcttgcacactggtgccctgggcagttcgtggtgcacacctgtgtgtatgcggagcctgtttgcccccaggtcctgcagcccctcatcctaccctggagctgtgtctttgtggtccctcgtaaacgtggggccccttgtgatacctggggcagcccctcctcactgtcgccagctggcccctgggctcccgccacagtctcctccttcctgggctccatcctttcccatacaacaggacaagtgaacattcccgaaggtcagtctggatcccgggctacagggccccccagagctgtgccacgcctccctcacatcccccacccccaggcacagccctaccaggccagctcaggagcccctgcctctccctaaactccaaagctccaccctcattccagaacgagctgctgccctgaaccctccccaccctgacctggctccttctgctgaggctccagccctccctgagcccgctgaggccgaagccccaccttggggccacgctctccaatcagccggccactttggctgaggccgaagccccacctcggggccacgctctccaatcagccggccactttggctgacagtggctggtaggcttctccagctcccacagccatggaagcgagggactgctccacccctacagagggctctggttgggcacacagcaaaccccaccacagtgggagggcccggccaccaggccagcatgccctcctgccagccccctgtgagccacaacccagaaagagcctggagctgagcggcccctgctgccccgtggcccctcttctccccgtggacatcaggccagtggtgttgccagatgaccatccctgcccagggggtcttgccctcatggcagtggttggtgtccttgcacagagcccagtgacaaccccccacggccagctcagggcaccgacactgatgggcagcggcctctctgagatggggcttctggcctttcctgcttctttggatgggccttagccaaggtctgtcggaatctccaaaccaggcctccaaacgccgagtgtgggctcagacgcccaatgactaaagccaaaatgagcatcacataagctctgaatgcgctctttaaagggtgacgaacaggtgtcaaaactgaacttatgtttgcttgcgtcccctccctggaggtgcgcggccctcactctctccctgcagcagacttcaggagaaaacgcagaagatttggctgcacccactcctgctcctcagagtgctgagcaagagcggtcggtctgagcagtcgggcagagttgtacctgcaaaaggcaggccacagattaccaacgttcccatcgctatttcacgattttcaaattaaaaagtgacacatattggctctaacaagggaatcaatacaaaataaaggtgtgaattccctcaaggttctgctgctgactagaatgggggcctagtcctggactagcacgtctgccctaaacagtcaaacactggacggaacgcacaggcaccagtctacaggcgcgggtgggtgaaggctgtgatccagggggaaggacacactgcagatgccacagctcccttcccagggcaatttctacccaggcacagaggcttgactccaggcagagcctggcagggcccctgagcctaggagctggagacggaagcaggagggcacagaggcggggcctaaaattcatggggccccaaggcctcagctgggtgctgctgcatttgcccggagggagcacgtggcaacctacagagaagctgccttgggctgaggggggaggaaacaagaagtggagggtgctggggacacagagctctggccaggccagcatggaaagagcccccgaatccctctgagatcccctgggcatccagccgagaaactagaaaggccacaactgagaagtgaggaagacaccctcaagtaggtctaccctagacgctggccatgcctaaaggcaagccctggcaggagccacaggagagacggagggtggacacggagtcccactcaggtacagagacttgggaggcccttgtgacatttctcagactccacccaacaaatggtaaaaccaaactcggaccaattcaggtggacccaccagttctcaagcgccaaggggaccaagagcaacagttctcttctggagaaggggagagtccagggcgtcttccacgaacagttacattgcttttctctccacgctcatcactgccttgttctgaggcagctccagctgtgctgagctgcacggagcaggggagacattctcagagcattccagattccagccagagacggtggggaaggggccctggagctcctgggaagagggctgggcaaggcctctcactcaggcatggaccaaagaatgttcttggctccccaaagctgcacacacacagaaaaggtccacgccgcacagaaaagctcccgagagctctgccgccaccaccagagtctggaaacataacattcaaaatattcacataaaattactcaacatatagtgaatttaaaaattacaattctcgaggaaaagataatcaacagatgccaaccccaagacgcagccgaggctggaaccatcagacgaggctctaaggcagttccggcagcgtcctctggaggcaaaggtgagcacacctgggctgcgtgagaggacaggcgttcccaacagagaaacggagagcaggaaacaaacctacacaaagactgtagaactaaaaaatacaacatacgaaatacaaattttaccccatgggcgcacagcagaatggagatggtggaagagtcagtggccttgaagatgggtgaatagaaacggcacattctgaagaacagagagcaaagggtgagtgtgtatgtgtgtgtgagcacgtgtgagtggctgtgtgcctgggcgtgtgtgggcgtggcactgtgtgggtgagcaggtgtgggggtctggcatgcgagggtggtgcaggggcgtggccgggtagctccctggtccattccccaccccactgccctccagcacctggtgttcggcatgtcacgggctctgccctcctctccttccctgtcaccacccacatcgttgtctatggcaaaccccagccctgggttctcaaacagaagcagcccagtggaaggttaggctgactcggtccagctgagttccggggttgggtccctgtttgcaggcccattggccagcaccccagtctctgcccgctggaggccgacagctcctcactgtgacaaccagaaaggtctgcagatgccgcccagtgtgcccaggaggccaggcagcccctcgttaggaacccctgtgacaaacacagaaggggactgggttggagatcacactcaactggaggttacgttttcacatttcttgctagaagcaaccggaatggataggcattggcaagccgattccaggacctctggccaggaagcccagggcctgcagctctctgtccagctcccagtgtgctaagagtggaccttggccatgccgcaactgccaacttcaaccaggaagggctgccacagctaggctcgctacgtacccttgctaggtagctaattcagtctcgtcagagccaccagacacagactctcgtgaccccacggcatcaaggagggttacgtggctggtgggggcaggatgaggagccaacctgtcttccatccagggacgcagctcccaggcccagatggcgacccagctccacccagccctggggtctttgtaggcaggcccaggagtggccagctaagggcacgtgtttgtcttgcccacgtccccatcagttccagggatcaggttcttgccacatccacctctcagcagcccctgtgggaggagagaggggtgtgctccaacgctggctgcctgcagggctgctctggggctgggatgagtagccttcccaggtgcccactctgggctgctcgggccctatctctaccatgtacgcccctggagcccacgagccgctggcctcactgccctgggctccaccctccatagcaagtcagggctgacacgacaggacacctgcggagcagcccaggcgcgagggaagagacagagacagatggagagacagagaccgagagatagagaacttcacaaaagagcaggccaaatgctttgctggaactgctccaaagacgcccccacaggcacacacactctcctacatgtgtgcacatatctgcacacaggtgtgcacaaacacacatgcttggtgacgtggaacccgaggtctgggtgggatcggcccccccgggacatttgggatcgtgctgcagccccgtcctctgctttaggagctccttcaggtgggaaccagtccagcaggagaaacccgtgagaatcccaaagtctcttctgcccttaagctgcagatgtttcatgtggttccaactcatttagtatattatccaggatttcaaagatccattagcaaaggacaaccttccacgtttgtttccatctgaattggttccaacgagacagtcctctgccagaaagccccacacacgcacacaacctgagaactcttctggtttcccgctgctcctccaccagccctgagcaaacaggagtgccccgcacagaggctggggccatggcaggtgtccaacatgctccctgcccagcagggatgtgcctgtcatgggacgtccaagggacaggcacccagcacacctggggtacccaccacacccggacacccagcacacccaggacacccagcacacccaggcacccagcacacccggggcacctacacacctggggcacctacacacctggggcacctacacacccaagcacccagcacacccaggcaccgagcacacctgggacacccagcacacccgggcacccagcacacccaggcaccctgcacacccgggacaccctgcacacccgggacacccagcacacccggggcaccctgcacacccaggcacccagcacactcaggcaccctgcacacccaggacacccagcacacccggggcacctacacacccggggcacctacacacccggggcacctacacacctggggcaccctgcacatccgggcacccagcacacccaggcaccctgcacacccaggacacccagcacacctggggcacctacacacccggggcacctacacaaccggggcaccctgcacacccaggcacccagcacacccgggcatccagcacacccggggcatctacacactcagaacaccctgcacacccaggcacccagcacacccgggcacccagcacacccgggcatccagcacacccgggacacccggcacacccaggcaccctgcacacccaggcacccagcacacccgggcacccagcacacccgggcatccagcacacccgggacacccggcacacccaggcacccggcacacccaggcacccagcacacccggggcacctacacacccggggcatccagcacacccaggacaccctgcacacctggggcacctacacacccagggcacccagcatacccgggcatccagcacaactggcacaactggggcacccgggacacctggcgcactcggggcacccacacacccagcacatgccgccccaggcccatggaactcgtgctctgatctgaaagttctcttcagactcagactggaatgttgaggatccgagatggtggccgcctggtagggacctggccctgcggtgggagggtgagcagctaggcccaggactctcagtgggtgacctcctggagggatgccacccagggtgcggctccatccaccccacattggaggagctctccttcggacaggcctgggtgggaaggcatccaggagccatgttgctgactgctgccaagtctcaggtggccccgtggctgtgccctggaggtggccccatgtcacccttgtgaggacgatgcccccttccctcctggcacacatgtgcccactgccacctgaagagctgaccggggcaaggggcacagctgaggacaagatttcctgaccacagctcagacatgcgctgggctgggagggaccgagacaggagatcctgccccgagaggtgggcgggggtggcctcctggacacgcccaccacagggagggctgctgtctcccgagctactccgtgttctctgtgctttgcacacatggtctttaatcctcaccaccactcagggctgggatgtgactgccatcaaacccattcccagaccagaaaacaaagacctagacagcttccctcgctagcccaggtcatacagctgctggggtctgaggaaggccaagccccagcaggctggccagagccaccttcagctgccaggcccacagctcacccacagccactgaccaggcagcagtggggatgccccacgtcagcctctgcccacagggcaggaccacagaacacatcctgccctccctccgacccccccgccaccccacgccaactctgcccatgcctatttggcaagccccagacaacactcctggcaatgccaggagcagctttcaggtctgtggtccccacacaaaggcacccagccccacccagtcacacgacagggtgccactgcaaagcctaaaccggagatagggccctgcatcatctcccgaccacagagatggggctgaatgctctgtacttacacacctgaaaaaccagttcctttcactttgccatcctagcctctcatgaaattgtactcaaaaaagaaagccacaggatgcgttcttgttatccctatgacaagcaacttagagcaacagcactgccagctaccaggctggccgatcttcaccccagcccccggggggttctgataaggatgtaggggagtgagtcacctgaccagtgcaccacccagctgggggcagggccgcagggccacacttgtgggaggcagacaacatgcatggccactgcagggggaggaaaatctggagtctggagcagaaggaaagtggctggggtgtccagagcacttccccactgagctggtggacagaggaacttccaggcatgtaagggagggtgctgagggccgggccctggtgtctcctggccccgagtggaaggtgaggctttgccaagtgcagcaggtgggctaataagcctgatggtggggggactgagaggaccagaccagggtgcgagaagagacatgaggtggctgtgtcgcaaaggccagcacctgaagcgggggaaggtggagcagtggaggctgcccagcaggcccctgggtctaggtggacactgcataggagggtgcagtgggcctcatgccaccaaccgcaccccatggaggcagaggggccacagtcctggagggtggggggccttgcagattcagcgatgcatcggggcacggcgaggaccatttcttggctggggctttggcaaatgacctcacctcccccacctcaactcctcagagcacgccctcggacatctcatggctgggttcacagccttcagaggggaagatgcccggacgtgtgaggacttgcccacttctggtgtcagagctcgggccctggaggtcaggttccacacagccagcagcgctcacagtccaggcatgggaacgggggcacaggaggggcacaaaggtggagagccccatctccctgacgctcctatgggatccccgaaccagtacgcccacccagcagagggcagggctgggacattcaacggggtgaggccaagggcaggggttacagatgttcaccaggggatgacgaagggcatgggccagctgcctcgggggcaccagacctgcctcggggtaccagacagttggcactgcccagtgggtgggttcggtgggtgttgaggcctggaaggtgtgtctgggatggtgagggggtacaggctatggctggctgagtggtgccggggtttgggggaggaagctggtgtttcctgcctctgcagggaggttcaccttgctttgtcccctcaacaaagccaggctctcgtgacaacgggtcacaacctggacagatctgaggagctgaacacctccagcttccacagggctcagccaggacctgggcccaacagcattccctcccagatggggccaccacgccacatcagcacgacgagacctcctcccagggtgccccccccagcccagggtccaggccccaggccaacacccagaggggctggctttgttcacagcccctctccaaaccctgcccccaccccaagcggccccgcggtcccctccagggcagggtttccagaatccacctgtccttagtgtgttcactgccccttggcagccccgaatttttgtacctgtttcctgtcccctccttgtgtccaggtagcatccccagggccctcgcctccagcacaaattccagcctgcagaaaccttgtcagctcagggggccacggtgcaaggcacgcccaggggagggaagctggggctgccctggggtgcctttctgtgcagctggagcagttccatatcctatgaagaaactggtacagaacagcactcctctgaaaaattagcaacctcatctacacagagactggactggagaagccccagcaggtgcagcaatcccagaagtgagagtcagagctgtggacgccacccttgctgtggcccaagcagtgaactggggccgctaacccccaggaagggtgaaaagccccaacacccagaagatgagaccctagagcttccctggccaccccagcagccctccccatcccaggaagcagacagttgcatgggaaaagcaaggacggcactcagccagacaggcaaacaactgtggcaaaccagtgccagcagacaaaacccagaaacacagagcaaatgaaatggtaaaaatcactgtcaacccccaaggttatctgcgcagaaagggtccatacagtggggacggccgtcctgaggcccgctggccgggctggcccttggctggcgtctgggaactgggatttccgaggggctccctgaaccccgcctcactgggcctgtgctatttgtacaaggtggtttaggcagaacactcacatccctgctgagagtctggaattgtagcgcagcccaggcagaagctgctcacgtgaccagcccccgggtacatcaccaggcagggcatccccaacatcgcacacgcagagtcccagctgcttgcaggggagtgaggcgcatcctgcgtgacccccaccccaggagaggcctccaaagctgagcatggtgcccctggactcggccccaggaacctttcccttggccgattttgctcagtgtcctccctgtgggaaatcacagccgtgactaccgtgacctgcatggcctctgtcctcctggagaatcgccgccctgggtggtcttggggaccccaactcagtatcacattagagttcttacccattaaaaagaatgcttagtgagaacactgggcaaagggcagaacagacatgcctgggggcctgtgctgaggcactcgcccagtgcaccccaccaggagcagcctgggaaccagcccagggaacgaggcgccagcacctggggaagcctggggaccctgcctcacaggattacaaaggaaagctgaccgccaactaccaaaacagaaacagcaaatcactgacacaggaatctgcctctttattgacatgctaagtaacaagacgcagaggcaggtctcatcgcaaccaaccgtgaccacagaggaccacagaggagtgatgacagggagctgtgcttctaagcaactgcaggagggaagcgcagtcggaacagcctgctggcttctagtggtcaaatgtgccactcacacaatggcatctgctgaaaaagctgcaaaatgtcatttataggttagtgaacacatccgtctcacagaccccaactaacctgagaattccagaggaagaccacagaatgacagaagggagatcagaaacagaagaaaacatgccagagctaacccaagtctgcagaaaagcccccaccgtgaggaatcccagctgggatgatctggtgtgctccctgggggcagtggccacaggctcctctgacaatacgacaaagggacacacactgcagggcagggaaaacacagaactttatttcaacagtcattaggttccaccacacaacagggacaccatgggattgttttttcatttaataaatacaaatgaataaaaatactttattttgtcaagagactgcctctcctccctctcccgatctcacagaagcctccaggcaattgtgtgcccctccagggcctgcacccacagaccccgtctacttgcacaaatgactcttctttacagagagggctccatctcatttgcctgcaaatacaacataggtataataccgctcctttcccccatctccttccaaatacgagttcttgccctgcgttccattttttttttttttttttttgagacagagtctcactctgttgcccaggctggagtgcagtggcgtgatctcagctcactgcaagctccgcctcctgggttcacgccattctcctgcctcagtcttcagagtagctgggactacaggcgcccgccaccacgcccggctaattttttgtatttttagtggagacagggtttcactgttagccaggatggtcgcgatctcctgacctcatgatccgcccgcctcagtctcccaaagtgctgggattgcaggcgtgagccacagcacccagcctccaaattttaaatgagccccttgtgagaaggaaaagaatctgctgtccacagaagccaggcgtggagctacttcaaccagaaactgtcacccatgacactctgtgtgggttcagtcacacagaccacgatccattatggaagggagggagaaaaggatcacatcaaatctactgtatgcctcatagaccatcccttatttcaaaaatagaaattcctatttaaatgccgcccgtgtgcgacaggcctgatatttgcttctgcatgtggcagatctgttattgcttacactgtggcctcctggcctgtgctgctcagctggccctgttagagaacatgggaaccacatcaaaatcctaagtcacaaaacaagggctctgtccccagcctgggcccaggggcccacatgcccacctccacagcccagtcaagtgtggggataaggcactcctctgtgctctgagctaagatatggtagagtcccttctgaattttgagttgcaaagaatgattttgtgctaataaattcccagtgcatccaaaatgtacaaaaaccctagaatttccagtttttagattgaaaaaaaaaaattttttctgtagatccagaagaaactttcattgaaactttaaagacctcacctgcacctgctctagtaatgcactagttactaatatacaaacgtaaatctttgatgagtatggtcgggaaaaaactgtctgtccttgtgatcagcaataaatttcttttttctttttgagactgagtctcgctctgttgcccaggctggagtgcagtggcgggacttcagctcactgctacctctgcctcccgggttcaagcgattctcctgcctcagcctcctgagtagctgagactacaggcgtgcaccaccacgcccagctaattttttgtaattttagcagacatggggtttcactgtattagccaggatggtctcaatttcctgaccttgtgatctacctgccttggcctcccaaagagctgggattacaggcacgaaccaccgcacctggccaatcagcaataaatttcttttctatttaccccatttcttattaattcacacttcaaaaaagcatttcctggaagtatttctaagtgtgatggtttgtaatatataacaaatgaaaagatgtaattagattataagaaaagcatctgcctgtaaaatatgaaggaagaaaggaagtaatggactcctcatggggcccacagggaaccaggaaggacccagaaagggtgccgggcccttcccctgtgctgcagctacagggccccatttcttcagaaggagcgttctgggtattccatcgtcccctggaagtctggcaggtacaaccccctcaacactccagggagggagggaatccacaggaagccatgaactgctggtttcagcggggagaggtagtgctgacagctctgataatctacctgaagccctttgtgaggaatactgtaaaactgcagtaagctgtcaatattcgacattaagtcatcatttcagaagagaagcctgtttgaagtaggaaaggtttgaaaaaaaaaaaagatgccatggttcttgcaagtctgccttgtttggtaccagcacagagcatcactgtcactaagtgtgccgggggagaatgctgagctgcttggcggtgtgtgcgcgcctgtgcgaggccaggtctcacagtcccagagacttctggacgatctgcttggcaatcttatagaactgctcccggtcatcgcgccacattttggacgcatccacgttagctccactttcgtcattgggctctgaaagaaaagggaacaccctccatgtaaaagggagtcttatacgtaagcagcctggcaaggtctcccatttatttaaaacactggcgggggctttcaagagctgtgtcccagaaacaaagaacctgagaactgcatggggtcggccccacctctagagtgctggccacgcaggtctcaacgaaagccactctcatgactcctgcgttctgagtgtctgaagacaccaggacaagttgtcatctgtcttgctgtggaacatgcgacaaccacctaagcacaggcccacacggcctcccacagcagcctcctgggccactgcacttctggcacccggacaagctacacggggaccacctgctgcttatttcacctttctcaagacactctgcagtgtggcttctctctcacagagcgccctctcagcaaaactgcccctcacagctcctaccaagacaatcccaagcaaatgtgcagcctaaggtagacacctgaccccaggatacctgacccaccccctagccagcggcactggcagtcactgcagaactgcagttaggaggcacggagggagtagccagggcctgccggaaggcagaacggagagagaccaccagaactggatgacatgtgctgaggcagcagctgtgcagtgcggcggtggcgctgctcagaatgcacgtggggaccggttcagagcagagttgatgaggataaaacccacagctgacatctgaggacagcctgagccactgcctccctcccaatctccaatcccctggcctggctccctccactcagcacatgaagagggttcacgcctcagccctctcaggatacacactcgcgtcacaggccctgacctcacatccctctagaccccactccacggcacccaaaggctctgcagagaatagctgagtggcctcactctggcatcgacccctggccctctgctgggtctgctctttcctttcggacttgccgccttcctttcccacacccttcctcctgactgccctggaagacccctccctgctatgctgtcaccctccgtcctactccatcacctactgcctcatccagaaatgaccccacatcttcactctcgtgtctgacccccttttgtggatggaggccccttgtcccacacacctcaaactattccccaaatcctgctgtctcctgaacccagagcagcacctctggtagacaaagaaccaggagtcccagagcctgtaccttcaaggtctcccaaacccaccccttcctcttagccctgggaccactcagcccttctcttttctctccaggctactgcaacaccacgatgtctctgtttgtcttccatcacactattggttactgctgcaaggatggcccttcgaaggcacagctcacaggacatcacacccccaactccaatccccagggtctgctggggctcctctccctgcagccttggctccagccaaaatgagctggcagtgcccccatcaagtcagccacctcctgcctctgggcctcagcccaggctgcttcctttgccccaaaaccccattccctccctcctacctcatcaacacctacatgtcctaaacacaccccagacagccccaccaggaagtggcccgagagtccctgcatgtgtctgatcttagggtgcatcccactggcctctaactgctggtaggcttggacagttccctagaacgtaggaacaaagagttggggtctttgtcacacgaagctttacacccccagtccagtgtgtggcatgtagtgggtcctcaataaacacctactgagggaaaaagacgatcaaggaccagagaccagttaattatggccgacaatacaatatacaaccccaggctatgctagaaggtatgcttacaattggaaaagtgtaggcagataacattaaatggcaatagcatgtgtaaactaactgcaaatgaggaaaaggacattctaaagacaggatgacgcaaggctggagaacacctgcagcctgggtgtccacggcagctcctgccaggaggctcgggccttacctgccagcatgctcaccaccgacagcaggatcttctccacactctgcacaggactccaccgctccgcgctgctctcgtagcccatggggtcatcgcctggcgcgtggaggatggaaatgcagactctcccatcagggtagactgcaagggtcagaggcagccaagtgagcccaggaatggtgcccgaggcatcgccgcgcttgggcaggctccacagataatgagaacaaagactgcagacacagcaaccaagctgtttgcacagctggggcatagcctggggccctgagtgtcacgcttcatgtctgcaggaatcccggtggggcctgctcactcactgacaggctccaggctgacccagccagttctaatcagctgtcgtagtctaatccactttcatatgaatttttttcaagcaatatatacaaaaagactaaatgaaaggttatctggcaaatattttatcaaaatatctaatgtgattaggattatttacaatacttttcagagctagttccttagctatttctaattctatcattaaatccctgaaccggtctgtgtaaaatatatgttcacatggctatgataaaggcaactggaattatgtaaatatctacaaaaagaaaggcaccaggatttctcttggtagcttactctaataataagtaaattatcatcagtacaacctggaatgtaggtcaatgtgtctaaatcaaatccctttccaccaaatatcatcattaaaaagatacacaaggtctgataaagagaaataaattttcaattcacagcatttaatcagtcctcttttacataaaattgggaggaattctcagatggctccatatatactcagatatgcagtaatccatctagatagactcaactgtaaaattataaagccattaaagttataataatagaaatagcaattttaaaatacatttatttaactcacctgagttaataagctctgaatttcatgaaaattcacaaatgtgaatggcgatcacttaccttcaaacagtcttgtctttcatacctggtcctatgtgtttccactcatccattgtttcagtggtgaacgttcagtggtgaacgctctactatccaggaactgaaccacaacttctcattcaaggagagtggaagaaactagatgcatacttgccctggacatcaggctgtccacctaagatccacatccacaaaatcaggaagtttcccacttctgtgttgccttctccaggagttggtcccatagggtgacactgcatccacagaagcatcaaaagcacctgtgtccctgccacagcccctccttcaccaagtcccagcagtgccatgtcctaaacctctcgtggatccacacacatctctttatctttagtgcccacatttagttcccaagttgccggtgtctctaccctagaccactacagccgagggcctgcctggcttcctcccacctgtcctttgcactgtacccagagcgagccgtcagagatcattctggtcatgccactcccttggagtctttcaatggagttccgccactcccaggagaaaacatcaaaaccttcagtattgaccaaaaggcctgaggtagtttggccccggccttcctctcccgtcacttcctgcgctgggcctttgcacatgtgaagggcccctcctccccgaatcactcaggtaactcctgcttcactccctacagatggtccatccaaccaccacctctgcaaggtgctgcccagaacttcctgatgtgactttgcattttgtttgtgtgattctcctatcaatgtccatccctgtccttggaatataagctcctgaaggtctgctattatttgctcaccactgtataccagcaactttcagtacgtgtgttgaattgtttttaaagtatttattgactagtttttatgatattggtagacctatagttctcaaagataatttttaaaaaatcaaaataatccaattacagtaaggcaaaaatttatattatctgagcattaaaaataattaccagaacattaaaaataataatcagaccacctgtagtacatagtcacataaggtaatcagtttattggtcatatttgtcactaatgccatgtcacaggtattgttctgaataatatatttctcctcaatacaatcttagtattttaattacctacaatcctcttcatagttgcattttatagctaaccaatttgaaactacttcaattactcttacctatcaattgtattttttaactttttattatggagaattccaaaaacacactcaagtagacagcgtgtgatgaacctccatgttatcatctaactcaggcgcatggccagtctccctgaaagaaggcacgcttctgagcatcccctgtgcacacaagactgaagcagctttgagataagaaaagaagtaccaaatggtctctctcaggcagccgcccactacctatgtgtaccaatatctgcagtaaatgagaagtcctaaacgagggttaggacagcaagtctattggcagacggcatttccaccagtgaagtggccgggggtgggggggtagtcctgaaaacccctatggcaaagatgtaaaaggaagaatgtaaaaggaaaaaataaaaactacagctgttcagaaattccaattcctactactggacacattttcaaataagctacagtacaattcacttaaatgaccttatttttttcctccttttaaaattaatatatattaattttagggcaaaaaaagatttacaaaaaggaaaaaaaatttcaatctgaaaaaagaatcacttttaacatttttgtgcttacttttccagttatatatacatttacatgtgaatttctttttcaagaggaaattataacagtgctactgcttttcccagtcaatataacacaaatactactttgtatcattgattcttcttttagatcatttaaaaaatctacatcacattctaacatatatgatatagtttgggtgtgtccccacccaaatctcatcttgaattgtagctcccataattcccacatgtcatgggagggacccagtgggaagtactgaatcatggaggcacatctttcccgtgctgttctcgtgatagtgtacaagtctcacgagatctgatggttccgtaaagggcagttcccctgcacacactctcttgcctgccgccactaagatgtgcctttgcttctcctttgccttctgccatgattgtgaggtctccccagccatgtggaactgtgagtccattaaatctctttcctttataaattacccagacttgaatatgtctttattagcagcgtgacaacagactaatacaatatataacttaatttattcttgtgttaaaaacccaggttaagtcaaaattttcaccattacaaataacactatgacaaagattagcataaccccttctgagcacacacccatgtgtaaaacttcctccccagtgaagtagggtggctgggtcaaatggcatccggttttaggtgcctgttgtcttttatctatattaaactgaccttcaaaattgaaatcatgtgcttaataccaccatgcttacttggctgaatttcaaaacataagaagtgttttctaaagatctacatcatagacatatagaatataccacatttcaggtggctgataatattatctccgtacctatcctggtaccacaaaaactacttccaaaagcacttactgttgggatgaaacatctcacaggtaaatctcatctttgggggacttaacgggtaatcaagtgggaaactcaggatggcaggaaaaacaccaaactcaaagcaggtgtcttctgggcccctagaagatataaaatacgtagactgaacttcaaagtacatttttcaacgtcgaccacaattgacaaatgggttaagaacatttttaccactttaaaaatgcacgtgaggccgggtgcggtggctcacgcctgtaatcccagcactttggaaggccgagacaggcagatcatctgaggtcaggagttcaagaccagcctgggcaacatggtgaaaccctgtctctactaaaaatacaaaaattggctgggtgtggtggcgcatgactgtaatcccagctacttgggaggctgaggcaggagaatcgtctgagcctgggaggtggaggttgcagtgagccaagatctcgccaccgcactcaagcctgggcgacagagcgtgactccgtctcaaaaaataaacaaaaataaaaataaataataaaaatgcacacaaaaagattatctaagtaacaatgaattggtactttcttttcagtggaaagcaatgtcccattctccagtttcaatctggtctaaatcttaggtacaagtacaaagactgaattccaggcagttttcacatttatgaaggttaagagtcaagcagcagaacctcttgataagaaggagatcagagaaaagaactaatgtcaatgctctaagatctgggagttttttctgcagatgtggtacaatcacattttaggataagggtatgaattacggcacagggtatagcaagattacattgtatttcaacagatgtggggctaagagttgtatttcaaaggtgatttttaatttttaaacgtgcccaagaaggcatctttgcaaccttcaagaagcagatgaagagcacatgtgatcactgctgcatgctcggtgaaaggctaggcacacaggcaccaccactccaggctgcacctgcaggcccatgtgctgtgcctcatcccactgatgcaacattggagcaactccccgtcatgggcacagacacaggcactgagtctccctggacctatactttcctcacgtgtaaatggaagaaatagatgaaaccatttcagaaatcctgcttaaggtttaaaacccaacaagtataaattaacactatcttgaccaacagttcaaggcatgatggccacaggagaggaagagtgtcagccactatgcctgtaccttcacaccagggacgaactcctcttctcctacaaatcacattaataaaacacacattggaggagttctaaaagatcttgcaccatctttctttgataaggaagcaggactgctgaatgacagcggcagacaacgaaacagtggaagttgcactgggtgtgactcatcagatcaataaataggtcagtaaacccgttctccgtctacgaactgaaagaacaagtcccttcctaaacagctctgctcctctaacaacaaaggctaaggcagaaagaacagtcgtgcaggggccgaggcctggatgagcagaggacagtccacaccagacctactgccttcagaaagaatccaggatatggcacaggaaaaaaataatttaaaaaaatatacgttttaaatcttcagttaaaaaatagatttcttaaaagtaaaaatttgttttaaaaatcttaaaattatcttggttcagtgaaattaataacaacagacttggaaatatttatctctataattaaaggaaaaagacaaaaatcaaaaagaaactgaacgaagagctttagctttcacctggaggcggcactcagggctgtcggcagcaacagcagatgccagcacggctcatggccctagcagggctgatctgcgggcaacagtcagaagagaacaaagcagtgattgcttcatggagacaagatttttcaatctaaaagacaaattttgattctgaaaactgtctttgctaccttttcagaagaagatagcgaatatggccactttgttttggggagctggggtggggggggggtactgtgtgacagtccccagagcctcagcatgaccagcacagggaacgccaccgagggaggcacgagcatgagctcttgctactggtacaacagccgcgctggagaggacagtgcccggatgagtaccccccccggcccacactggcacccagcgcccggcagcctggggacgcctcaagcctgggttactctgctccccctgcaatggcctgaacaaacacattcctgaagccccgccttctcaacacagggtgggcacacaccatgtatcagagtgaggcgtggccaccccgagcctcctgtccagtacaagagctcagagcaaacgataaccaccacccattcattctccacacgccctctgatgaaagggcaccaaggattgtggttttcattttactgtcaagcaaggctggaaaatccaaggatgaaatgacttagtcaaggtcctagatcaatttagtattagagttaagagaacacagttcaaactgcgaaatcagaagtcaggcacataaagatactatctttaaaagtaacactgttcatatgtcaggaatgcttgccagcactcaatatttctggcacctctgagtccagaataagaaaaaatgtctgggtagtgtttttggaatgagccaaatggtatttgctcaatactttgataacagttctttgtttctcataatagggctttctttaaaaaaaattttttttaatccaccaggtcgttcctagcctcagaagcatgaccaaacatttcctgaagtgcgcccacatcttaaatatcaaagttatttgcaaatgctccggtttactactggtttgaaactgggatttctttctcttttctagaacgcctggcgcccagacaggagggcagatgggcagtggtgtgcagcagcatgcctgaccccatggaacatgccttccaggcaactcccgagccaggagtgggagacgccacagtgctgtttttggacaagttttattgccatactcccagacaacctcacttctctttcaccgaagatggcctcacctgggaatcttcaaaagaaacaacaacaaggaggacacaaatatatccaaagcaaatgtaaatttttcaaagcctgcaaattatgctgccttattgattgaaatcatgacctaaactctttcggagctgagctaaggacaagcattagattaagcatcataatgaccctgcactctacacaggaggcacgcttgcaacagctcagactgttttgctgtcttgtgggtgaattagatacaaaagcaaatattgaaaacacccatggcctactcctgactagcaattctccctcctcacaaaggacaactgccttgtcactgtcctcctccagagttgtgaccattcctcagcaacagtgtgggtcacttatatgccagtgaaaagcgaagatcagcctcttctgtctttccacactcaactcaagggagagattgttcttctttgcattgcctttctaacactttttactttctagataagagaagcagcaggcaggtcagagtgccttatggagcacccagggcaagtgggtgccctgagcttcgccggcaagcggtgttccaggaactggtgcgctcgccacttcagctgcacgcaggtgttgggaaagccgactgcttttgctgctgttctctttatcaagtttgtcacagcacatagacaagaagtctccaacgcacatgtgataaagaattaaaatcacagagaatgcaaactcatccatcagtatttaaaacctgaagtggatgactaagggacgatggccctccaaaagctggagccagctgagctggagacgggaagggcaaactgcttcatgggcaccctccactctgggggaaggataagcacctcccttacgctacagaatcgacagagggcacccagcaggaagggcatgagggctcccggcatctgagcttgggtgcgtctccttccttcagtccctgctctgcagttcagcaaaagcttcttgccgatgttcccaccccactaatgcccaggacagcaggaccaaggtgggctgcacacacagcccccacactgggcactttaaaagccctaggacactggctctgctatgccaggttgtgcttgtggctgtgccaggcagtgaggagttaaatagaaactgatcccaataccctcgtagcaagaggacgaggctgtaagaagccgtgatttggggaagtgccttcctgcactttcctccagcacttggtctccaccaggatgacatatttgaccctcacccccagagcagggccctggctctggtttaaacccagagatcccctgtgtttcctttctgttttgtggtgttctaagcaccccaggcgatactcaggtagataaccaatgctaagaactgctcggaagaaaagggggaacatttccattttatgaaatcatagtaggggcaaatatagcttttgctccatataattattttcatagttaaacctgtccaaaaggcatctacagccataccctaattattttttgcaatatagatgtttcttaaaatttttaaatctaatatatttgaactataaagtgtactaaataagttcatcaattataagaactttatagtatattctaacatagacaatcacttttacaacataaactttgaccttatttaactaggaaaataaaagaatgttggaaaatattcaaatacagaagtatataaaataaaaagcaaatacctccctcactccccctcccaaaatcacctccttgaggtaaccagagttaagtttggttattgttccagcttttctctatgtgtgtataaattcacatactctaatctacaaaactggatttctaaaaattcaaatgtatcatggcattgctgagaattttaaaacacctaaataaatggagagacagtccatgttcatggattagagcactcagtactgatatgatggcaatatccctcaaacttatctaaagattcaatgtagtctcaatcaaaatcccaccaggcattttgtagaaattgacaagctgaccctaaaatgtaatggaaatgcaatggcctagtaaacaatcttgaaaaagaacaaagttggcggacttaaatttcccaattttaaaacttaccatgaagctccagtaatcaagacagtgtagtaatggcctaaggataggcatagatcaatggaatgcaattcagagtccaaaaataaatccttgcatttatagtcaactgatttttgacaaaggtgccaaaattatgcaatggggaaagaactgtcttttcaacaaatggtgctgagacaactggataaccacatacaaaagaatgaaacagactcccacctaactccatacatgacactaagtcaatcaaaatagatcaaaggcctaaatgtaaaagtgaaaaaacacaaaacttctacaagcaaacataagagaaaatctttgcaaccttgggttatatacaacaccaaaagcatgctctatataagaaaaaaaatgcaaaatcacacttcatcaaaattaacaactttttagtttcaaaagactctattaagaaaacaaaatggagagttgcagattggaagaaaatatttaaaaatcctatgtctaatgaaggacttgtatcaaaatatattttaaaaactcttaacgttccatcaacaagaaaacaaccgaatataaaaatggggaaaagttctgaagttcaccaaagaagatacatgaacggccaataagcccattaagagatgctcaacatcattagtcgtcaaggaaatccaagtcaaatctgtaaggagaccccactttacacccacaagaacagctgttatcagacaacagcagtgttggtgtggaagtggagaaactggaatgctcatacactgctgctgggaatgcaaaatggtgagctactctaggaagatagtctgatagtttcttaaaacattaaacgcaaatttactccacaccccagcaattccacacctctatatctggtctagagaaatgaactccatgtccacacagacagtgtgacaagacaagtgtttacagcagcattgctcaaaagagccaaaaagtaggaagcccaaatgtccatcaactggggaatggaaaaggaaggagctgctgatacatggtataacatggatgaactgcaaatacattctgccaagtacaagaagccaggcacagatgattagacagtgtatgattccacacataggaaaagtcagaaaaggcaaatctatagtcagaggaaagagcagggattgcctgggggttggaatgggaactgtctgcacatagacataagaatctttttggaaatgttctaaaactggactgtggtgatgactacaaaactctagaaatttactaaaaccactaacttttatacttaatgcaagtaaaacttacagtatgtaaattatctcaataaagctgtttaggctgggtgccttggatcctgcctgtaatcccagcactttgggaggctgaggcagaaggattgcttgaggccaggagttcgagaccagcctgggaaacagagcaagaccccatctctacaaagcattttaaaaactagctgggcgtggtggtgtgcacctgtggtcccagctacttgtggggctgaggtgggaggattgtttgagcctgggagtttgaggctgcagtgagctgtgaccaggccactgaacttcagcctgggtgacagagctagaccatgtctccataagaaagggaggggaggggaggggagggaagaaaggaggggagaaaggaagagagagaggagggaggagaggagaggaaggaaggacggacagacggttccagacctattattctagaatccgccttttccatttatattgtgtacatctttccatgccaggatgaaaattccacctgaactgttttacagctacatggcattactctatatagatgctccataaattatgtggaacagtgatgtttccttttttattattattactgcaatgaatgtggcaataacttcttcatatagggatctttgtgacacttttgttgaagaaaatgctatggtgagattacatacaatacaaattataaacacctattttattatctcgggtttatttcagcaaggcataatactgccaagagatgccctgtgacagtcttcagtcaacaagaaacctggacataaagggaggctgctgtgccccggacactggcccccagtgtgagaagggctcctggtagaagccgcggcagcctgggagccctcaagctggctgccatgagccagctggagaacctgggagcatccatccaccaactgggccccaaacacaccattcagtaaaggaaggtccttcttatttcaccacagcctctagaaccactggtctggggaggtgacagcagtcaggcatgaaccagacaagaaggtcaccaagccagctgatttgggaatgctggggcaggacacagaggacagcaagcgccaagggactccacgccttgtccggccactggggatgaacagctgtctaggactccttctgtcccacataagtgcatcaatgaaagagggcacccaccctctctgcagctacacccccgtcaccgtggcttagtggcaatggggtcacgggccatggaccctagagctgggcaagacctgtaaccatctgtctagaagatgctgataaacctctctgttttgatccaaataagtcaaagagaggcaaagtgactgggccaagagcagcaggccatgctagcacccacagccacggtggccacatcccctggtgtgccgccatcccagccacgctcgatttgattgcaggctcagactccaccatgagcgtggcagggtcagcagagttattcccggtgtttaaagacacagcctgcggactctcattatttagtcctctcattcactaatctgttctattctccatcctaatccctcaaccctggtcttccaaggtaaagatttcagtgcatctttgacatgtctgtatcttcagacaagggccctaacatatcaaaggcacttagtgtttgttgcttagatatctaaaatgacattttcttcactggcccttaaggcaagcacaacagcaaaaaccaacagccgttcgacttctgtgaggcaagcacgggttttagaaatactagggtagagaggcggccctggaagccatcaaagaataaagagaaaaagaagaaacttatcaccaaggagcaaagacttggccagatgtctgccaaaatagcagggtgagacaaatcgatgggaggacagttaattccctaataggcattttaagtgcacttgtaaacggcctcttgtttgtgaagggtctggaacaggaccaaaacccacaaactcactaggatcttcaagcaggggaattccaaactaatgcaaaaagccttgttcaaacacagaagtgctctacctaaaaatagttctaattactttttaagacaggttttcaaaatattggtttaattttacactgtttatttaaaattggtaatagttaccctaatcgatttttaacaatgaacatttttttaaaaccacactggacggctcaactgttcctttaatgagcttccaaataggcctacggaggagccaacaccccacaaataactgcagacacgacaggcgccttcaacctctacacacagacaggcctcccgccactctgggcccctgcagcaggcgtgctgccccgctggcatgagtgcaggtgcgcctgcattaacacatgaaacaagcaggttacacatcagttcatgtatatgatctcctgcttctacagaaataaaaagagctgccccgatacaagtatacagccgcacagtccactaatgaggacagcccagactgtgggactcgccatccatctcataactgccttgggggccacattacacacaaacacagattccagaaaccttcagacaccgaaaaaacatgtgccataggcccaagcaattaggatattacaaatgatcaggaaatggcaggcgtgctgtaccatctgaatagcgtttgatgattttttaaaaacattttgtttatccaaaatactaattttcatatcaatttaacctccacagacaacacttagctgcaatctgtttctcagaccaacccatagagcattaagaattaatgtgatccaagcaactggcgaattccaaaagcatcatgaagcttaagatcacttcaagccagagcccacacttgtttcacagccctcacttttccggtccttgccctctagagcacttctcaatgcaacaaaatccaacccaagaccttgctgcaaattaaaagacctcactaatgagataacaaagactgggcttggcgcggtggctcacacctgttatcccagcactctgggaggccaaggcaggcggaacacctgaggtcagaagttcgagaccagcctggccaacatggggaaaccctgtctctactaaaaatacaaaaattagccaggcacggtggtgggtacctgtaatcccagctactagggaggctgaggcaggagaatcgcttgaacccaaggggcaggagttgcagtgagccaaggttgtgccaccgcactccagcctgggcaacaagggcgaaactccatctcaaaaaaaaaaaagaaagaaagaaaaagaaaagaaagaaaacagagactgattacaaatttcaacttcctaaattttatttaacctcactttgctgaaaatacactaagaatggccaaaaattgcacatctaaggtagaaagaagaaaaagcaaagtgagtcaaggccatagaacactctaaaatcaggggtccatgtgtttctctttccaagcaacgtcaccctaagttaaatgccacgaatcccagaaccacactgctcacttactaagccatgtcttgggtcggaaagaacacaaggccaacaagtccagacaaggcaacagaaaaaggagatgcagcacacgaagatacgaactgggaggaaaggagaagaaaaagaagtcctggcccaaaggcagggcaggcaaggctgcgctaacatgcctggtgtggtcagacacatctttgaggacccttttctcgtcaaaatttcacacctgaaggggctacttctggaagccaaagccacctacgccatttgaggttattttaaccacgatcatacaacattccaaaattaccaccttaaaactctcaaatatataatacatatattacataattataactaaacctttgactggctctaaggaaacactcatttcttttggatcaatgctcaggttctctgctttcagaccagcagcctagacgagagctgggcattactggagaactcagtcttttttccagctgatgcttttggacacagtcacactgctgatgtgattcttacatctgacttccagcaaagccctaaaaactagtacacctaaaattaacttacatgatcaatgcctcccattcaaaaaagttctcttcattcatggggcctgtagggtgagaaaaaatttcacaacattttaactttgaaggaactttggcaattaaaagtaaattataaggaagttaactttggtaccttacctgctacaattccttccggaggattcagtgttaattctataaaattaataagtaaaaccattaccaaacagaataaatgttacattgtcattttaacaaaacacctttacaaaatatataagcctataaaccatagaatatgcatattaacaagtgaaaattctgtttgcccaaagtgaatacctagtacaataacggttctgataacaactacacaaagtttttttgttttttttttgtttttttttgagacggagtctcactctatcacccaggctgaagtgcagtggtgtgatctcagctcactgcaagctccacctcccaggttcatgccattcacctgcctcagcctcccaagtagctgggactacaggcgcccaccaccacgcccagctaattttttgtatttttagtagagacggggtttcaccgtgttagccaggatggtctagatctcctgacctcgtgatccgccagcctcggcctcccaaagtgctgggattacaggcatgagccaccgcgccggcccaaatagttctttataccaacaaaacatagacttttctttttctttttctttttacaaatgcaaaagcaaacataaggggtacactgtctttccaaactgttcctgctggttactttgttgcttagttttgagacagggtctcactctggttgcccaggctggagtccagtgggcaaccagagtgagactggggaaattaataaaacagtaagcaaacatacagaaaaaaaaaaatcaatgaaaccaaaaggtggttctttgaagagacagaaaattaataaatccttgccaaataaatataaggtataaggactgaaaaagaaataaaactcattattcacagatgctatgtccatatatacaggaaagcccaaaagaatctaaagataattagtaaaagtgagtttggcacagttgctgaatatgaggcatatatatatctttctaaaagatatataaaaatgcaaacaatccagaatagccaagacactatctttaaaaagaataaacagagggccaggcgcggtggctcacgcctgtaatcccagcactttgggaggccgaggcgggtggatcacctcaggtcaggagttcgagaccagcctggccaacatggcgaaatcccatctctaccaaaaatagaaaaattagccgggcatggtggcatgcacctgtagtcccagctacttgggaggctgaggcaggaggatcacttgaacccaggaggcggaggttgcagtgagccgagatcgcgccactgcactccagcctgggtgacagagcaagactctgtctcaaaaaaaaaaaaaaaaaaaaagaataaacagaaagcttcatctatgagttaccaagccttccttacagagctatggaaattaaggcaacgtagcactggctcaaagttaaattgaacaatggggcacaagagaaagcccagaagcatacctgtaccaacagagaccctgactcgagggaacacagagctatggcccagaggcaaagggcagtcttttccatgaatgatgctcatctctaagacaaaaaaaaatcaaactttccccatctcacaccacatataaaaatcaaaataggtaagaagaaaaatggaggcagagttgaaaagagccactgtcagagtcaacacgaatgatgctgtggtccaaacgcttgcgtccccccaaaattcctatgttgaatcctaatgtatgtggtattgggaggtgggacctttgggaggagattaggtcaggagggcagaactctcatgaatggagttagtgcctttataagaagaaacgagagatttgcctctggccatgtaagggcacaaggagaagacagtcatctgcaaaccaggaagacagccctcaccagacttcccagcctccagaattgggagcaataaatgtttgttgtttaagctccctggtctttggtatttttttacagcagcctgaactgactaaaacagatggctaataagcacatgagaaaatgctcaacattgtgaatcataagggtaatgcaaattaaaaccacaataagatacagctcaatagcttcagcattatcagtatctttagtcacaaaagaatggccaaaattaaagacttaaagtgctggcaagtttagcaagtagatctctcatgcaccactgatgggaatgcaaaatggtttggttaccctttgggaaagaagtttgaccatttccactaaaattacatatatattgactctaagacccagcaattctactgggtcttatgttgccatagacttttgtgtgaatgttcatagtagctaaattcgtaatagccccaaactggaaacaacccaaatgtccattgatatggtttggctttgtgtccccacacaaatttcatcttgaattgtaatctccaggtgttgagggaggaacctagtggaaggtgactggatcatgggggcaatttcctccatgctgttctcatgacagtgagttctcatgagatctggtggttttataagtgttcgaaagttcctccttcactcttctttcttgccaccttgtgaagaaggtgcttgcttccccttcggcttctgtcatgataagtttcctgaggcctccctagccatgtggaactgtgagtcaattaaacctctttcctttataaattatccagtctcagggaagttcttataggagtgtgaaaacagatgaatacagtaaattggtaccaggggtactgctataaagataacctgaaaatgtggaagcaacttcagaactgggtagtaggcagaggttggaacagtttgaagggcttagaagaaggaagatgtgggaaagtctggaacttcctagagacttgctgaatgcttttgaccaaaatgctgatagtgacatggacaatgaagcccaggctgaggtggtctgaaaaagagaagaggaacttcttgggaactggagcaatggtcacccttgctatgtttcaacaaagagaatggtgagattttgcccctgccctagagatctgtggaactttgaacttgagagagatgatctgaaattggaactcgtgtttaaaagaaagcagggaataaaagtttgaaaacttcgcagcatgacggtgcaataaaaaagaaaaacccattttctggagagaaattcaaataagtaacaaggagccaaatattaatcgccaagacaatggggtaaatgtctccagagcatgtcagagatcttggcagcagcccctcccatcacaagcagggaggcctaggagggaaaaatggttttgtgggccaggcccagccccgctgctactctgtgcagccttggtacttggtgccctgtgtcccagctgttccagctccagccatggctaaaaagggccaaggtacagctcaggctgttgcttcagagagtacaaaccccaagccttggcagcttccacgtggtgttgggcctgtgggtgcaaagaattcaataactgacgtttgggaaccttcacctacatttcagaggatgtagggaaacgcctggatgtccagacagaaatctgctgcaggggcagggccctcatggagaacatctgctagggcattgcagaagggaaatgtggggttggagctcccagagtccccactggggcactgcctagtggagctgtgagaagagaacaaccatcctccagaccccagaacggtagatccaccaagagctttgcactgtgcacctagaaaagccaaagacactcaatgcccaccatgaaagtagctgaagggggtgggtgtgggagggctgtaccctacaaagccacaggggcagagctgcccaagaccatgaaagccactccctgtatcagtgtgccctggatgtgagacacggggtcacaaaggagaccattttgagctttaagatttaatgactgcccagccggatttcggacttgcatgggggcctgtagccctttgttttggccaatttcttccattggtaatgggagtatttatccaatgcctgtatttccattgtatcttgaaagtaactaacttgcttttgattttacaggctgctaggcagaggggacttaccttgtcagagatgagactttggacttggacttttgagttaatgacgaaatgagttaagactttgggggccttgctgggaaggcatgatttgttttgaaatggaatggttttgaaaggaacatgagatttgggaggggtagggggagaaatgacatggtttggctttgtgtccctacccgaatctcaccttgacttgtaatccccaaagtgttgagcgaggaacctggtaggaggtgactggatcatgggggcagtttccctcatgctgttctcgtgatagcgagttctcaggagacatgatggttctataagtgtgtggcaagttcttccttggcttgctcttctctctcctaccgccttgagaagaggtctgtttccctttctgccatgactataagtttcctgaggcctcgtcagttatgcagaactgtgagtcaactaaacctctttcctttataattacccagtctcaggtagtatctttatggcagtataagaacggactaatgtaccgattaaccgtttaatgaacccacaaccttgggtagaacaaggcctacccaaggaaaaattatttcactcaaaataccactaacacctgctgagaagccctgatccaggaaacagaggtcctgaagagacctaagtgctgtcacaagggtgtgctgacacccagcagtgagagaaggcagagtggcaaggaggggccagcaaggcaggccaaaggcaagtgctggccccaagggccaagtgcattaaacatttcaggggtgggtgggaactgaatgtgaatgaggtcaagtaccaagccgactaagaccttggatttcacaagccacaccctgatgttctccctttgtgtctcttcatgtggagtagatcaggagaaataaccacagaacctaatttgctaggcttcctacacccagtcatctaaaatctagtcccattcttgtgtctcaagccaaaccgcctaattataagaaaaaaataacagattacggcagatagactgtaaactgctaagcaggtggggtgcgggagaaacacaatgtcagtgggcaactaagtagaggcctggcagcagaacacacaaaagctttacaaatcaccttcgtgggaccatgaagaagagctcgtaccaaagagagctggctttattcttcatctggagttcccctttggcactcccctgcgtgacaccctcccttagggaggggaaagggtggtctaaaaactgcagctccagacctgctcctggcaatgcaggctcagcacagagacctgcccgggtgtgcgctggccttcccgccagctttgttattcaacagtggcctctactggtcaataaagaagtgcagcaaatgagttcagaggctggagggaatggttcagggcacttattttttccattttgttttttgcttccaaagcatatacacgcgtacacaaaataatatacagtttcatgtttactgataagaaacaagttcaaaaaaagagacgaatcttggtatcagggaaattttcagaggccattccttgccacttaaaatagtggcttaacaaatagctaccacacaaagtgaaatataacctttgacccagcaattccatttctaggaatccatcccacagataacattggtgaagataaaaaatgtatacacaggctattcatttcaggactatttgtaaaaacaaaaagaaattaaaaagaacttgagtgtctatcaacagaggaccagtcaaattatgatacatataccagtggggtactttgcagctataaatacctctacatgctagtacagaacaaacttcaggacatattacatgaaaaaaaagaaggtggagaaaagtgtgtgactagggcctttaagaggtaattaaaattaatgtggtcattagggtggaccttaatccaatctgactaatatccttttaagaagagatgaggacacaggcatagaggacagagcctcagaagaaaccagccctgccctatccttgatcttggacttccagcctccaggactatgaggaaatacatttctgttgtttaagccgtgcccagcctgtgtggtagagcagccctagcaaacacagtgctgaaacaactgcactgccatttacaaataatttacaaataaaccttggcctttatctcataccatatggaaaactttgatatggatcccaaacctaaatacaagagctgaaactataaaacatctagaagaaatcataggagaaaatcctactgccacctgatgtttggcagttatttcttaaatataacacaatagcaagaaatattttaaaagtcaataattgaatttcatcgaaataataaaaacccttctttttttgtttttttttttttttgagacggagtctcgctctgtcacccaggctggagtgcagtggcgtgatctcggctcactgcaagctccacctcccaagttcacgccattctcctgcctcagcctcctgagtagctgggactacaggggtccgccaccatgcccagctaattttttgtatttttagtagagagggggtttcaccgtgttagcccggatggtctccatctcctgacctcgtgatccgcccacctcagcccacaaagtgctgggattacaggcgtgagccactgcgcccagccaaagaactaaaacttaagaaaatcaacacaattttgaaagaagcaaagactcaagtcactttatctaaaaagacatatggatggcaaataaacacgtgaaatgatgctcaacatcacgagtcttatggaaatgcaaatgaaaacctcagtaagggccgggggctgtggctcatgcccgtaaatcccagcactttgggaggcgaggcaaactcctgaggtcaggagttagagaccagcctagccaacatagtgaaatcccgtttctactaaaaatacaaaaattagccaggtgtggtggcacgcgcctatagccccagctacttgggaagctgaggcaggagaattacttgaagccaggaggcagatgttgcagtgagctgagatcatgccactgcactccagcctggatgacagagagagcacctcaaaaataaaaaataaaaaaaaataaataaataaaacaaaacctcagtaagactgctatacacccaatagaatggctaaaatttttaaaactggaagggcgcagtggctcgcagttgtaattccaacactttggaaggccaagacgggcagattgcttgggcccacgagttcgagacaagcctgggcaacatggcgaaaccctatctctactaaaaatacaaaaattagctaagcgaggtggcatgcaactgtaatcccagcttcttgggaggctgaggtggcaggattgcttgagcctaggaggcagaggctgccatgagccatgactacaccactgcactctagcccgagtgacagagtgagaacctgtctcaaaaaaaaaaagaaagaaagaaagaaaaaagaaaacaaaaaacaactggccacgcgaagtgtcagcaaggaggtggggcaacgggaacacttaatacactgctagggaaatgtgaactagaggaaaactggccgtttctttaaaaattaaacacacacttcccattataaccctggttatttacacaggagaaataaaagcatatatccacagaaagacatgtacatttaggacatgcacacagggggaagatggccatgcgaagatggaggcagagattagaattacactacctcaagcaagagaatgacaataaacgccaaggatgaccaacaatcaccattagctggaagaggcaagtaagggttctcccctcgagccctcaagaggaagaatgaccccatcaacacctttattttagatgtctggcctccagaacagtaaaagaataaatttctgttgtgctaagccccccatgggcagcccacttctacctgggtctatctctgacactcctaggaaaggctggatgatgaatgaagacagaacatcaagacaagacagcagtttacaacaattgagttctttcctggctctccttttttcctgtttatgaacctaggcaaaatcatcttgtctgttgctcaattccataaaatctgtaaaattagggggcttgaacagaatcatagccaaggtcccaccacctctgaatttctgcagttatatgactactcccaaatacaataaagtgtgcatgaacatctaaccaaatttatctaaaccccttctatgtagagattgattctgtcaagtccacctttacactggaatgtgctaccttaaaatacgttatgaggacaaactagatgttaagatacacacacaaaaaaaaccagtaaatgatacacaaaaaaaacccactaaattttatcacattattaagatacaggaaaaacaaagtcccctcaataacacactgtattcatcttctgtcactgctgtaacaaattaccacaaatttagtgatttaaaacaatactcattgatgatctcagagtttccaagcgtcagaagtctggacacagcatgggccagctagttctctgctcagagtctcaccagggctgccactccaagttcattgaggttgctgacagaattcacttccacgggtctgttggtctgggatcattctcagcttcttgaggctgcccgccttccttaggtcatggctccttcttccatcttcacagccagccacagaaggtagagatcttgtcatatgttgaatctctctgaccacccccatcctgccttcactgactgcttttgagccttatgttattattggatccttcacggtaatccagaataatctcccactctttaggtctgctgattactaacctgacttgcatctccaaagtccctccaccgaagtactagaaagtgcttgaataacaagggcatgggaatcttagtgaggtatgtttagagttctaccttctacacatagtccaaaatttcatgttaacatgtaaaaacacacaacacacttccgtgacaaaccttcggaaatcaaccattatttaggtcttattactgcaaactaattgacaatataattgaaataacagatgaagcttctgtcaggacaataaaagggagaacatatctttgctaatgcaaatatccttagaaaatgcaagttcaacaatgcaaagactggcctgaagcagcagcctgaacttaatttcctatgcaggggtttaatgattttcttctcaataaaaatgagaaggccgggcgtggtggctcacgcctgtaatcccagcactttgggaggccgaggctggcggatcacgaggtcaggagatcgagaccatcctggctaacacggtgaaaccccgtctctactaacaatacaaaaattagccgggcatggtggcgcgcgcctgtagtcccagctacacgggaggctgaggcaggagaatggcatgaacccgggaggcggagcctgcagtgagtcaagattgcgccactgcactccagcctgggcgacagagcaaaactccgtctcaaaaaaaaaaaaaaaaaaaaaaaaaaagagaaaatacctgctcacagtctagcctaaccctagaaatagggctaaaataaaactaaaacagagacacaaacacaaaccaggataccaagaaatggtaggtgttcacacatctgacccaccagccaggtttcccatgaggacacagaagtaatagtcccccacatccaaccctctgttcgagtatgaacattgtcagaatcaaaatggagtcactttcgccaaaccctgacaacatagagggaggtcaagatgaagacagaaaaatcagccaggtgtaggggcacatgcctgtagtctcagctactcaggtggattaagtgaaaggatagcttgagcccaggtcaaggcttgcaatgagctgtggttgtgccactgcactccaacctgggtgacagagcaagaccctgtctcaaaaaataaataaataaataattattatttgccaaaatatgcttaatttttattgctaaaaaatgctaacaatcatatgagccttcagcaggtcataatctttttgccggtgcagtcttgcccggatattgatgactgctgactgatcagggtggtagttgctgaaggcaggagtggctgtggtagtttctgaaaataagacaacaattaagtttgccacagggactgactcttactttcacaaaagattgctctgtagtctgtgatgttgtttgacagcactttacccacagtggaacttcagtcaaaactggagtcaataccctcaaaccctgcggctgctttatcaactaaatttatggaatagtctcaatcttttgtcatttcaacaatgttcacagcattttcaccaggagtagattccatctcaagaatcacttctttgctcatctgtaagactcaactccccatctgttcaagtttgatcatgagattgtagcaactgagtgacatcttcaggctccacctctaattccagttcccttgccatttctaccacacctgcagttgcttcctccccttaaagtcatccatgagcattgaaatcaactttttcaaacgcctgttgttgatatggtgacctcccatgaatcacagatgttcttaatgccatctagaatgataaatcctttccagaagacttttgattttctttgcccagatccatcaaagaaatcacttttcatggcagctatggccttatgaaatgtatttcttaaataagtcaaaagtgctcccggatccatgggctgcagaattggtgttgtgttagcaggcacaaaaacatttatctccttatacctctccatcagagctcttgagtgaccaggtgcactgtcaggaatagtattttgaagataatctttttttctgagcagtaggtctcaacagtgggcttatattcagtaaaccatgctgtacacagatgtgctgtcatccaggttgtttttccatctctagagctcagagtagatttagcataatttttaagggccctaagattttctgaatgataaatgagaactggcttcaactcagtcaacttaaagtgaccgacattagcccctaacaagagtcgccctgtcctttgaagccagtcattgacttctctctagctgtttacgttgtatatggcatcatctcctcccaataccgtataaggctattttacgtaccttgtaaatctattgcttaatttaggagccactttcatcttgatcttagctagatcttctggagaccttgctgcttcaccttgtgcttttctgttatggagacaggttatttacttcaatctcatgaaccaacctctgttagctcccaatttttcttctgcagcttcctcactgctctcagccttcataaaactgaagagttaggaccttgctctggattaggctttggcttaaaggaatgttatggctggtttgatcttctatccaaaccactaaaactttctccatatcagcagtaaggctttttcactttatcattcattgtgttcaacagagcagcacttctaatttcctttaagaacttttcctttgcattcacaacttggctaacaagagacccagctttcagcctatcttgactttcaacattccttcctcactaaacttaatcatttctagcttttgatttgaagtgggtagagtgcaactcttcacttcaacacttgagcccactgtacagttactattggcctaatttcaatgttgttttgtctcagggaagagagaggccgggagagagatggggaaacagccagtcagtgaagcacacacaacatttattaggactaccatcttttatgggcatagtttgtgatgccccaaaataattacaatagtaacatcaaagattactgatcatagatcacagtaatagattaaaatgtaagagagagacacgaagcgagcaaaaatggtgccaacagacttgcttccatgcagggttgcttgtaaaaaacttgtaaacttgtaaaaaatgcaagatctgcgaagtgaagctcaataaagcaaagcgcgcgggaaactgaggtgtgcctttatgttctgctttagcagacactaggtggcgagcgttatttgaacgtttacaggaggccctgtgtatctgcggctgcatatccatggattcgaccaaccaggaatacaaaatatttgaaaaaaataacaataaaaaatgacgatttaaaaatacaagtaaaaaaaatcagtgtaactatttgtgcagcacttacattgcattaggtactataagtaaccttgagatgatttaaaagttatgagaggctatgcatacattaaatgcaaataccacgccaccttatagtagggacttgagcatccgaggattctggtatctgcagcggggcctggaaccaatcccctccagataccaagggaagaatgaccatacgtgagtgagcctgtatttgcaacgttttggtctgcttaagccaaacatcaactcttactgggcggtgtcaccaatagttttacgaaatcaagctacatgtatattcaccacttattttttttctcacattcattcttttagcttaactttcttccaaaattatcctcaatctaattacaaaagcagcagctaactttattaagggttacacatcaggtattttgctaagcacttcacctgcagtatcaagtttaaccttttaagacaaggaaactgcagagacagagagaggaacaaggtcaaagagctaacaagcagagaggccgggtctgaactcaggccctgctcttagccggctactatctcgtctccatcggcgactcaggctcctggcgctttcaacacaatggtattccaagacttctcgcagcagttcttccaagcgggcattcggtgtaaaacgatggaatgccgagtgttcctaggttctcatttctcccttcgctctcctcagacattagaaatatctaatttaccgggtaggaaagcactcaagaggtttcctcaacactacctaggaggagtgacaggtggcactgttcaaaaacccttttccttcattagagggaaagccaaaatctgacctttcaaagctccaccaacgagcctttccccttttaacgcatacacttttccctcctaattccgcagcagcaagtcaggccttcttcctcaagctctcactgcacgttctcaaggctgccaagaaaagaaaaaatagaagagaaaaaaacaagcccgcaaagactcaactgtgtgtgctctcaactaacacggcgccggcgctgcctttactgatgctgggaaggcttctcttcacgacttcacgcgtgagagtgggcagcgggcgcagggcgcggcactccgcgggacccacaggggggctcacggtggaggccccgggcccggctcccccgccaggctccctgccccagccccgccggacgacgcgggcccgggagcaggaacgcgggacgctgctgacggcccgggtccccagactcacgtttgtactcggccatcagcctcttgagcgcggtccccgccatggccccgcaacagctgcgccgagcgacctcgcctcagccgcgcgcgtgcctcctgccccgacaccggggactgcttccgggccaccgtcgcgggcccaggaactcttccggggcgtggcgcgtgcgcgatcgccgaggcgcgctgtccgggtggtgggagctcaacccgcgaccgcggctacgattctcttggctcctgccctcgccttagtcgctctgcggggttggttcggtcccggcacttccagaggcctcagggtcctggtcttgtagagacttcctgaacggtggcgcctgttccagtgtgtgtgcgctaactgcctgttctgtgccagccgcgcgtggccgaagggcgggaggacgggggttgtggaggggaggatggaggttggggagacagggcggggacgagataagaggtcggggggtggggaggatggtcgcggggcggtctggggctggagacaaggggcctgaggtgcgggtacgcactgaacattccaaccgtccccagccggccgggtttcaggtttgaaaaggtgggaaggttagctgtcctggcgcttttcctccacgtgttgtgcggctccgctggagttcgggtccagcaccttctactccgagggagagagccgcggggagagccctgttcgggcccgcggctcgaactgaccgccggctctgccgagcagcctcgaccccagggcacccccgggagagagggcgcggctcaggtccctgcccgaacccctggggtgctgagagactccccagcgccccgcgtgggctcccggcctctccacagttgaggatcctgtaaggggcgagccctttttcccataatggctgtagtgagtgggtgtgctttcccgattgacccgctgtgaggtgagcgattttaacccacatccttactgacttcacagcacagtaggtgcttcgtggctgtccggtgcaaggatgtatatacacacacacctttgcaaaaaaagtttgcatctcttgcctggctgtttgttgcaataatctatcatttgtcttttcctttccagcattgcagatgatcccttgaaaagaagtctgatcacattcacactctgctccgcccatttcactcagtaaagctgaagtcctgcagtgctttgctctgcctccggtcaccccgccatactcccagaccctccctccctctcactccactccagctgccctggcctggttcagagtccctgactcttccctccccggaaacactttctggcggctcttgtccccgactcttcccacctgctctttcagtctttgctcaaatgttgcctcttcagtgtggcctaggccgtcaccacccggccttcaccgcatacctttttctctgcaacacctactcaacacaccgtactatagaacttactggcatgctataaatgtattacccttatctgttgcctctaaccaaaagcgtgttccatgagagccatgggtccctgcctacttctgtcttgtttctggggcagcctctgtacctggacatcgtatactcttaacacggatttgtcaaatcaaatgaaatttaacaatacaaacttcacaagtatgcatagtgtaggaaaattccccaaaattcaaaatttcagtctacctccatcttttcaaatgaccacagtgctttataaaatgacatggtcctttgagactgtttcagagagtaatttgtgcaaatgcaatgtgcaaaaagtcacagtggaggtgtttcctcccccattcaagagctgctctctctctaatcagacagcaccccacaccccaaggcagtctgtccagtgctcctaaaggagagcagctccccttttccagttatgggagatgtgggcaataaagcattactgtcaatgccgtgatgttcactgcaacatatgcttgatgttttcataattttatccatctttttcagacatcttactgcagaacactgtatgttttccaattattatttttcagaaatgtggtttacagcttctatcaggattagcttcagcttcaagtgacaaaagtcacttgaaatatgagttgctgaaacaagatggcagtctctcccctcaacaggactgttacaacaccttatcttcagagaaccaggctctctgcaacatttcagggacgtcgttcagtaccttatgtggaattcaagcttagctgggcatcctatgttttaactggctaactcgtggaactctcaacttggatcaagtggtagtggagtcccagggactctgagcagccagtgtgtgatactgcagggcagcacaccctggggaggccaactgtacagaataaaattaatgctttctatctttagcaactaaagttctgaaatataaaaaggacctcacagcttaacccatgttatacggtggggttttcccatgaacatcacgcgtttccagctgggcactcctgcagcatggctaagatgacaactcaagttccctgggagtgggggttcctgggatgtgaacctttcggtgcaaaaactggagaagttccagttgggaccccaggcatagatactaggataaatagggcctctctcctccaggagcatcaatttaacccaaagattcttggagtcagtttcacataagtaatcttgttgaaaatagtaatcccaacagatctatttttccaaatgcaccatttgcataaatctcagaaaaaagacaacttcaagaacatacctttgctgggcaccatggctcatgcctgtaatcccaactacttggcaggctgaggcacgaggatcacttgaggccaggagtctgagatcagcttgggcaactgatttatggtttggatttgtgtccatgcccttcctcttctgccatgattataagtttcctgaggcctccctagccatgcttcctgtacagcctacagaactatgagtcaattaaacctcttttctttataaattacccagtctcaggtagttctttatagtaatgtgaggatgcactaatacagcaatatagtgagagctccatctctacaaatcttttttagaaagacaggacatcctgctggttctgctgtgaggtgttgtgggtggaagttcaagcagcgctgccctaatacatccacatatgctcctggccattattcttatctaacctacggtgcctgggacacatccctttcctcattgattttggcagccgcttcgccccaggctgcctagggaatctggcagatgtccccatcctgtattgtgccttaatccgtgcactcttcctggtgcaagtgaatcacgtgttccatctccacagctgcccatctttcttcaccttgggttcattcaactgatgggctaaaacagctcattttcaacctgggttttgttacaccactgcacactgggaaattcttaaagccaaatcaatgtcagttcagtttcaaagcagataggtaagttgtccatggcagaaggaaagctgacttacattcaaacaccagaaaacgagagatgtcctagactaacacccaagctcacctgcctctaaaatccaccctttctttacatacgaaacccaggagagggagggtaacatgtcacagtgatgccagctcagacagctgtcagccaggaggtctctgaggagaggatgcatccctcagcaggaagaaggctggactagcattggtgatgtgccaggggaggggaaatgagctgccaggcgaatactaaccttccagcggctagcttttcaatcaaagtttctcagtgcagtggctgcctggaatggtcaattcaaacactgaattgtaccagtatgccccaaccttcaaatgcagtgtttagtagaagccaagagacagaataccaaactatatttactgtttacagtagtaaaggacaacaaataatgtacaaattggtgaataaacacaacagagccaacaaacatcccacccgagcccatacagcaaacaggaaatgagaacatttcagcaagatttcaagcaagcaagagatgatgggtcattgttcaggtgactgtaaaaaggcagagaatggccaccaagcagcaatggagcctcagggaaggacaataggcagaactatgaaaatgtttaattggtatagatcccaaaatatttcacagaactgaaatcaccagactaatgcataaattcaatacctatttggaaagcagcacggcacaaacccacgagaagaacatgaagtcatcattccatgggttcatttgtaaccacacttggaagtagctcttatacacgacaacataactgcaaattcagcaatacttagtcttacttttttatgtatagaccataatcattcatcagaagcaaatactagaagaaatctgaggccacaacaccattaccaaatgagaaatgtgggaatttcttcaatattaagagggagaaaaaggccaattttggttgtgccaatccttgcctgtgtaccaacgccaggtactgagcagggagtggggtgggaggggtggcaggggggtgggtcctgggcctcagaccccgaggttacatgcttgagggccagagagcacgtggggtcaaattaccaaaagactcggttattttttaacctttgaagaagcattccagtattttcccttcaacttttccatatactgacaaagcttaaatttgcaatatttagcattttaatcacctgtgcctgtaacagcaagtgacagtctgtcctccctaccaaccttgcccccaatacctgtccaacagctgcatccccactgcgggaaacaccaattctctatgtgactggagtgagcaggggagaggcaaccaactcaggagtcagatccctggccagactaaaagcgaacattcaggctataattttggggttaaaaaaatgttgtaggagggggggaaaacacaaatgagcacacaaaagtacccacaatatcttgcaactcattttacctgaacaaagataacaattctgattggcccaatttaagttacagattcatccctgcagatatagttttgagttgcacttgaagtacatcaaagagaggaaaatcatcgtggtgaatgtcctcgagtttccgcagacacctttgtggtcggcatggtcacgtgctcaccattcaacagcaatgcgaggatggacggcccgggctggggacgggccctctagaaactgtgccctgccaggctgctctccggcacacctcccgtctgctgctggaacacgtcgatggtgtcctcgtcctccatctccagctgtcatggttgtcacaacaggcacagcgagagagaggggagcctgttagttttcatcagagagtgggaagatcctcactggcatgagtgttccctgacactagcgacatcacctggtcacaccttggctcttgtccgtcccctcactgcagctcagcacgcatggaagaggcattgctgtatgctcactacagcccttacggttcaacaagcttcccctaacaaaactcacaaaagcagattcaaagctaaaatgttaactgagagaaaaactgagtctagaagataaactgaaatgtctaaaattcttactgaaaattacacaaaatcagattctaattaagaacatctgattagcagcactgagtcctaggacccacaggagccttgcgctttataccaagtgcgggggaccatgccatgaaagccaaagcccccagctcacagaagggcccgtcaagtgagggtccattgccagcttctccccgcccctccccatttaaagcccaggcaaggtagtgaaacacccccgctcacttctctcctcctgacacagtgggcgcaaaacacccaccctgatcttcttccatcctctaagcaagaggaagcttctgccagttcctacacagactcagcaaggctggaagtagtcatgctcccagatggaaaggagtcccatcagggctgtcggccaccctcaccctgccaccgacactatgggctggagggagagcccccaggcagggctccctctgcctctcggtccacctgtccacagccagccccctgacccccagtcaagccccagagactccacgaggccctccctgctcagctgctctcagcagcttctccctggtgaacactcccagagctgccactgcctcagcggtgtgtaggtttcctcaagtaggtacaaatggatacttgttgcaaagatgttttcaatatttattaaatactgaatagtaaatatttaaaatcttaaatgttttgcaaaaatatttccacataaaacattccagtggattctcacaacattgaaagggagaaaaagcaggtattggttccatttatggacagacaaaactgagactccacaagatgaagtgatgcttggtcacggggccatcagctgacaaatgacaagagctgcaacttgaaccaagtttaaaaaaaaactctgtttcggccgggcgcgttggctcatgcctttaatcccagcactttggggggctgaggtgggcagatcacaaggtcaggagatcgagaccatcctggctaacatggtgaaaccccgtctctactaaaaatacaaaaaaattagccgggagtggtggtgggcacctatagtcccagctacttgggaggctgaggcaggagaatggcgtgaactcaggaggcagagcttgcacagtgagctgagactgcgccactgcattctagcctgggcaacaaagcgagactccgtctcaaaaaaaaaagtctgtttccaggtccaaagctctttccatgacagtatgatgccctgcaacgtgatagatgaaatctcattcatgtctgcatgtgcctgagagaaacgagctgtgcagactgataatcaggggttatggcacattctgcccacccacgtcacttgtgcaagatgcttaaagggcacaagaatccagctggcccctaagctgcacacgggctacaacagcaagcgtccagacaatgagtgggaaggggccgctgagtggtccttgcacccccgcttcccttacagtgaggacgggcccagcacttggctccatctccaaacagcaagaatgatgtctgcaaagcagttttctcatttgaaaatttaaatttaaaatgtgaaaaataaataatctaataatcaatatcattaaggcattctgtatgagctcccacctacaattctcaaataagcgtatcccaaatggcagttaccccgcacaaatcggaagtcgccctggaaccacgcgaagccagctccgtacctgtgctggagtgtcagtttcattgattggctgcccgtcgaacctgaatctgatctgcctcattgacaagccctggaaaggaaaagcagtggccattagtctcactggcaagccctggaaaggaaaagcagtggccattagtctcactgacaagccctggagaggaaaagcagtggccattaaacatttccagatacggcttaattcaaaaaccaaatattttaatccaagtatcagcattctgatatgcagatttatgatccagctcagtattaaaaactcaccagtgggcctacaatctctttcacgcggtgcctgacaccactgctttcagaacccactcttctaccatcttctctctgatgagctaaaacggctcattttcaacccaggttttgttacaccattgcatactgggaacttcttaaagccaaaccagtggcagttcagtttcaaagcagataggtaagtggtccatggcagaaggaaagccgacttacattcaaacaccagaacacaagagacgtcctagactaacatccaaactcatgtacctctaaaatccaccctttctttacatacgaaacccaggtgaggaagcgtaacacgtcacagtgacgctagctcagacagctgtcagccaggaggtctctgaggagcaggagaaaagctggactagcattggtgatgtgccaggggaggggaaatgagccgccaggtgaatactaaccttccagtggctagcttttcaatcaaagtttctcagtgcagtggccgtgtggaatggtcaattcaaacactgaatcttctctgtcctggtgccctgacctgtcctgggtcatccctcccatctttccagaagccgagtagaacttctacaatgctggcaccactacttcccccctttacaaagttctcagcaaggaacaggttgtgtgccaatgagggacagataagaaggctgcatgaggccggggagcagttaccaccatgactttggccttgaggagggcagcaggaaggagagcacgcagcctttctgcgtcctgagggaatggagaaatgtggtcaggggcagaaacatttcctcaacgagcagttttgatttaactgaaacaggacagacggggttaaaacgtgcatctctgctccctcctgaaaccccactgaaatgaagtaaatgaaaaaggcacaaacaggaaggacaaagaaaacgggagtggggatgggcagatatgtcaatgctgggctgagccagaggctactgaggcgtggacactggtggtctgatggacactggaccaggatcctagggcggagggactgggcacgccccaacctgtgaggcagagctgtggcaggcagctgattctgaacagctgcctggaagttcacatgcagacccctcaggcaggacccccacaaccctgtgcctcccacggcagcacacatgagatgtgctttctgagaaggtgggtgcggagctccaggcgcagggcggaaacaggcccacgaaagcgcgtgccctcaacactgtgcgccaagtcccctctcccctccagatgcgcctccaggaggctggccggagcctggaggactcaactctcaaactgtagcatctgggcgcctccagaacctgcaatccagacagatcaccccatgtggatgcacagccctggcagcacagccatccatgtacacagcttttcagcagcttctcggtgctccatgcttgcacagaagtcagcctgcgtgagagcagtcagggaaaggctcactgtgcagcagcctagagaggaggggaggagcgcagaggagaacggacaggaaggaggcaggagaacactcccaacacaggcacacacatgcccacacccacacatgcccacacccacacacatgcacacacccacacatgcacacccatgcacacacccatgcacacacccacacatgcacacacccacatatgcacacacgcacacacccacatacacacacgcacacacccacacatacacacacacgaatgcacacatgcacacacccacatacacacacatgcacacacccacatatacacacaggcacacacccacacatacacacacaggcacacacccacacatacacacacatgcacaaagacacggacatacacaccacacacacctacactcacgattcaaattctatgggaagtaaaaaatactactaccttcagaaaacaatcaattgctactgaggatgggtgcggtggctcacacctgtaatcccagcactttgggagaccgaggcagaaggatcacttaagcccaggaattccagaccagcctggaccacataaggagaccccatctccacaaaataaaaaaatgagccaggcgtggtggcgtgtacctggagtcccacctactcgggaggctgaggtgggaggatcacttgagccccagggctcaaggctgcagtgaaccatgatcacaccactgcgctccagcttgggggacagagtgagaccctgtctcaaaaaaaataagttgctactgagaaaaaaagaacactcaaagaacagaaagaaaaaagaacttttggaaattaaaaatcatgacagagatgagaatgtccacaggaagtggaaagataaagttgaaatgacctcccggaaagaagcccaaatgcaacaataaagcccaaagcaaaatgggagaaaaattatcaaatttaaaatatctaggacaatgagcagcaggaggaacaggaactccaaaaagagggaacagagtctggagaaggatacaaattatcagagaactaacataaggcatatttcctgaataaaaataaacgtccagacccataaagtgcccagcagcatgagtgagaaaatcacccacctctgaggcacataaggaaacactgaatgccagaatatggtcccagatacttccagggaaaaaccaagttacaaacaaagcacagagaatcagaatccactgaacttctcacctttttttttttttttttttttttgagacagggtcttgctctgtcacccaggctggagcagtgatatgacctcagctccctgcagcctccacctcctgggctcaaacaatcctcccacctcagcctcctgagtagctgggactataggcttgcaccaccacacctggctaatttttttaatgtttcgtagagacagggtctccctgtgttgcccaggcttggcactgaactcctgacctcaagtcttgaattcctgacctcaagtgatcctcccacatcagcctcccaaagtgctgggattacaggcataagccaccatgcctggtgaacttttcacttttaacattgggagctattctcatggctgacctctgaaataaaaaagaaaaaaaagtttcaaccgagaatattacgtgcagccacatactgaagtgtgaaggtttataaaagcaaaagtcacgttcagccatgcagtgtctcaaagacgctgcccttctgtgcccgttctgacaagaccctggaggatgtgctccaccacaaaacacaaaagggaggaggactaatccaggaaacacccaagagagaacccaagtttctagaaggatttgaacaggaggccctggaccacggctgagcagccagcctcacaagcagcagtgcaggtggggcaggaggggagctccgggagagcagggggaagggcagagccccccccacatgtacacggccccacacgcctgccatcccgcagcgcagaggagaacatgggcacccgggaagtcacacacacagtggccacgagcccaggcagtacaaactccagcaagggccagggcccagcatcaggcagaggctggatcacggggcctacacggcgccaggccactcactctgctgggaagaccgggacctgcgtgtctggaagctcagtctcacctttcgcaggtgaaaataagatctgccctcagcaaacacaaagaaaggaagtcaggggctgcttgccaataaagaatgcaaggcagtcgccagtgactgcccctatgagcagggtatccaaagtgggagggaaagaggaggaaatctaactgaaaatccacaggcaaaagagtaaaataaaagggcaacgagttgctgtattttcaaagcggctgaagaaaagcagcctctaggtcccactcaggcaagcagggctccctggggaagggcgcctggctgcagggccgggcccccaacacaccaggcagcagctggtgggcaaagcccataaaagtggcctagagagggaccccctggcccagggtgagtccgccacagcgttaccaagaacaacagacacacacacaccacgtcacaaacagcagccagaaggcatccacccagctgggcactgccagtggggcagctcattatcctgaaactggggaagaaggggaaagaatcacgcgctttcttgcctttcctaacaaaatggaaaaccacaccgcacatgagggcagtgtctctccagggtcaggccagctcatacgcgaggacagggtgacagcggcgtggggcacacgccacctgcagccccagaatggccagacctgagcagggcccccaagagccttcagcatcacagacttcacagatgttagtaccccatggagaacacagcaccccgggcagccgccctgtcaggaagaaaaacccaccacacttctccgagcctctaggtccctccaccttataaaaggccatgggggacaagcccagcctggactaattttacagcacaagcccccgcctgcccatccacgaagagggcacctcgggcagctgcatctgggtccagccccgagacgctcgtgctctggggatgcctggaacgcacaggaccagtgcgcacacggggaggctctgcgggggagcaaggtgccgcacctgcctctcgcagtaggccttcatcagcttgctcagcggcgtgtgcctcttgatcttgaactgcaccacggagccgtcctgcccggccaccttcaggttgatgtggtcattctctgtcttcacaccctcctgcagaagacaccagagactggcctcaaaactgtgtctcaaaataaccgcgacttgaatgggcaagtctttaggtaattgttggctttttaaagtcatcaaaaccaacctaattcttaaaattctccagcaattcagagtcactcgtgatggttttatttttacacagaatttatttttaacttccacttgttaagcatccatgtgtaaaacaatgcaagcctagggtcctctgacattgttaattcaaagaaaaaaacaaagtctagggaaaaataagagaaaatccatctttattttaaagttattcttgtgggctgggcacagtggctcacacctgttatcccagtactttgggagttgacgtgggaggatggcgtaagcccaggagtttgagaccagtctgggcaacagagcaagaccccatctcttttttaaaaaattcttatgaaaccagtaaaaacacatatccaaaagtcatgcagctatacagcactagtaaaagaaaccaaaaacagaagaaaacatttgtgactcagaggaaccctatgggacattcaagtggtgatttcgggaatccaactgaggacggccactccccacagcaggcggccaggctccttctcgctgccctgacatcagcaaatgtgagggaagccacctccgagtactttctggtttcaaactgtcctatctgagcggcagtaggtggtactattttattttttaattcatgccatacttgaagctactcaacaatggcacaatcggggtgtcttgttgcctgaaaatgcattttgagttgaggcaaaaagctgatgtcaagagactgggagccaacttcggggcagctcagtctgagccgaaaagtggggcacccctctgccggcctgcactgctgggataaagtcgtttgtgagtgaagcaatgaggcagggccctccggctcactctgaaagtcaagtctggggcgtcctggtaccctttcaccccatgctgagctgctgccctcaggaagcactgtacatcacacgcctgttctctccacttctcctttccttccctggctgggagagggacaactgtcccagcgatgcctaaatacagggagtgggatgtagaaggctcgcctgagggtgaacccagggactgcacccatgcttgcttccctggggtatgcaccctggggagaccctggggaggcatggtgctctgtcaagggagctagagtggcctgcaaggggccttggcagtgaggggctccagctgcgagcctgaaggtgcgtgtcctggggcggcactcaccccccgactccagtcttgggccagacacccctgcccactcccgggatgccagtggcttggcggcagcctgagtggtgagctggcacacccccatctccccatcccgaatgtggcctccagcacagagacaactggcctaggaaggaagagcatgcaaacagctccaggcaggatggaagtggggacccctgcatgagcccccttcacttccccaagcatgaggatgcactggcttctttagggaaggaaggtatgagtgtgttcaaaggcacagatgcagggcccagacgtcccccacagggtaatggctgcagccccggggggaatggctgcagccccgggagaggctggggcagggcagggccggccacagtgcctctgctccaaacagaatgacgatctgtcccagacccctggtgaattcctaataagcaagtgaactcgtgagttaaaaagtgaagccctaaaaacatgggcctcagtttgctacagtcaatcctccacctcagctatccagggaagtcagaaccattctcctgcctgacctaaaagctcttctttccagcaccaccgggccccagagtccacctcttccccttcgtcagagccccagagggcagagctgctcccacatgggctcagaggggacccaccagaagcggggcctgtgaggtggcagccactcagtcattctggaattaaacaagtgttttcaacggaactggagcctgagattgaccacatggcagagctaagtgtaaatactgctgagaaaattaatatcatatgtattttattacatttactcttcattaagaggaagccacctacaaaaacataaaggacatttatatttgacctagttttaacaagtatttaaatattcaaacaaccccagagtgggagaactttgacttcactggagtcaaaatgtaaaaagcaaaggtcaccccaaatgccatctggatagggcaggtttccctggagtctgaccacagcaagcagagtgcagacttccatagaggccgcgaccatggttcctgacggttccatcccacttcccgccagtgtctggcactgagcctccaccctcatctgtaaagggagggtggtcacctccaggaccaggccagtatcagagacagcctctttacagagccttcagctctagtcatcttccactgggatgtaacatagaggccgacagtgcacaccaagggcttcggaaaggttctctttttatgaacactggagaatgcgactacagaccctcccgagaaggaatggccagtgcacctgaatgcagggtgcataccccaggactgagactggagggaggcacaccccagcatggcaatgggggagactaaagcccacccaaggctggataaggaggggtgggcgcgcatggtgggggaggcgcaatgcagagaagtgggcgcacaccgtggggcgtgatagggaggggtgggcacacactatagggggcgtgatggggaggggtgggcgcacatcgtggagggggtgatggggaggggtggacgcacactgggggtgtgatggaaagggggacgcgatggataggggtgggcgcacactgggggacgcgacggggaggggtgagcacacactgggggtgtgatggagagggcgacgcaatagggaggggtgggcgcacaccagggacgcgatgatggggacgggtgggcgcacaccaggtggcatgatggggaggagtgggtacacaccatggggggcgtgatggggaggcgtgggcgtacaccggggggcgcgatggggaggggtgggcgcacaccgggggacgcgatggaggcggtgggtgcacacggggcgcgatgggtgggagtaggtgcacactgagggcacgattggggagacacgaaggagaggggtgggcgcacactgggggacgcgatggccgggacacgatgcggagaagtgggtgaataccggggtcgcgatgggcgccctggaaggacggcagtgctgctcacaggggccaggcccctcagagcgcgccccttgggggtaaccccagacgcttgttcccgagccgactccgtgcactcgacacaggatcccgcacccagggcgatgccgggggagagggcgaccccaaccagcaatgactcaggagaggagcacgcaaagacgcttcggggacactgctggggcgggatccgagggcgccgcgctctgcaggagcagcagcgcggggcccgacaccgggcgctcaaggaggcgctgggcgcgcgccttcccagctggggaggagacgggcgtggagcggaggcgtggccaggcccggagggggcggagctcgcggcacagcgcgcttcgcgggggcagagggggcgcaccttgggcgggcccacttaggggcggggctctagagggcggggaggggcggagcctgtcaggggcgggacgcggggcggagtcggggtgggggcggagccgggctgggggcgggacgcccgcgatagacgcgcgtgcaggcggggtcgccgcgcttaccttgggcttctcctcggacatggctgcgcgagcggcgcggggaggcggcgcgggggaagcagcgcggagcgggcgagtcacgctctcggccccgccgctctcccgccgcaactgtgcgcggggccgcgctttatcccccaaatcccggcgcacccgttggccggcacgggggtcacgtggctgcgcgcgttcacgaggcgcgctccccggggcgtcgggcgcgcgcaggccgggccgcggctctgggcggttggagatgcgtcacggggcgggtcccgcgcgaccccgtcgggcgcggaagccctagggcgctgtggggcgcgggccaggagcgtttacggggagcccgggccctggggacccttgcccgcctccccgcgtcgcccgggccccgactcctttcctgggggccgcgttcctggggcgccgggaagtgaggccggggccgccgcccatggccgcagggacctggggcggaggagggaggacgctgggggtgacgttccctctcaggagccgcggacagagcggagaaggcggcccgcggggtcccgtccgcgggggccgcgcgaatcgggccagcaccctagacgattgggggcgccacccgcctccctgccgccgcggtttcctgtcagccccaggccgggctcctttggccaacgctcctacggggctgccccgggccctccacacccgtcctcaagaagacccgttttacctgtgaagaaactgaggcactgggaggtcaaaccacccccaggtcagcgctggtgagcggcgccgagcttggccaggccgccacgtcggcgagcgcgggcaaacccaggctggacgccgccagtgccggcggaacggggacctcgtggacgcgggaaacgcgctgggccggcaggacggcctccccggacttgcgggcgccattcctggggtgcctggcccgccccggcctccatgtctgtgatcccagggcctcggatggaacggacctgagggcggacacccctgcgtccctcaggagtgcccgggtggtgccagccggggcgtggcggaggtctcatctgatggtgagcccggccgaaggcgggggaggccgcacttcaggctcagctgggaaatggcagggcctggatttgaacctaagcgtctgagccgtttctgtcctgcctgggaaaggctcagccaactgagcaacgtcgcaaagccatggagacaagtcttcatggaccataacttcacaaaccgtcttctactcaaaaattcactttcttggctagagcccccacttaggagggggaaggctgctgaagtctttcggggagagggtctgagagtcagccccagtcccaggcaggtcataaggtgtggtcccttccttctggaacctggagcccagggcctcagcagaggatgtggaggtgggtggccagctcagacggtcctgggagggggctccgcaaccagccccttccgaggggacgtggcgcctcagagcccacagattgctggccctggaagtgccctagggcaggcagggttcagagagttatcgactccaagacaccgttaatcataaaacaacacgaccgtaggtagcacagacacactaaactccggcaggctgtggatgacggcagcccgcttcagtgttgtggaagtgagaaacacgcagcttagaaatcatgagacacagaacccaaatgtgttaccgctcgaaattacgccagttgctgtgtcacgaagtgatgcgtgactacagtcatggataagggaaaaagaggctcagatgacattaggttttaaaaagccaggctataagacaatggtggtctgaattcaattcatgctgtgtctgtctcccacactgtgacctgccccgaatccttcatgtgacagcaaagatgcaaaaaggctctgtcgcagctgtggggacacaaaggacaccgctggtggaccgaacgccaagaggtttctgaaggacacagccaaaggggatcgaatggacggaggaaccagagctcaggaaaaaccgtggcctaccacgagcacagggtaaagaacccaaatggccagagcccctccggagggtcgccacacctggcgatggtcccaacaagaagactcatgagaaggcagggaactggcaaatgagtaacagcattgctgacatgaaagctcgacccacatgtgactaggagaggggtcctggctgaggacgcaaagaactgcgagacaaagtcacaggactctcccatgatggagaagttaagagaggaaaggtcagggctgggctgggtggctcatgcctgtaatcccagcactttgggatgctgaggctggtggattacaaggtcaggagttcgagaccagcctggtcaacatggtgaaaccccgtctccacaaaaaaattagccgggcctggtggcgcatgcctgtaatcccagctgcttgggaggctgaggcaggagaatcgcttaaacccaggaggcagaggttgcagtgagctaagatcgtgccgctgcactccagcctgggcaacagggtgagactccatttcaaaaaaaaagaaaagagagagggaaggttggaaggccgagacaccgggcatcagtacaggaagggctacgtccacctgacaggagctgcaggagaaggtggaaaaaaggaaaccaggacaaaatcaaagacagaattggagaaaatatctctgaggccaggcacggtggctcacgcttgtaatcccagcactttgggaggctgaggcaggcggatcacctgaggtcaggagtttgagaccagcctgagcaacatggtgaaaccccatctctactaaaaatacaagaattagctgagtgtggttgtgtgtgcctgtaattctggctccttggaagcctgaggctggagaatcagcttgaactcaggaggcagaagctgcagtgagccaaggtcgcaccactgcactccagcctgggcaacagggcaagaccctatctcaaagaaaaagtaaaaataagaaatttctctgaactaaagaaatatttgactccataaatggaaagggcccctgagtatccaatggctgagtgagaagactgacacagatgcttggcatgtgaggagaaatccctgaggcgttcagagacgtttctacttacagttagggaggactggttgcctcagacaaacccaacaaaaatagcccaaaaatcagtataaaatattctttaaatctgtttaaggctatcagctaccaaaagaagtctttctgtgaggggcaaagaccttcccccacctcaaaaagaaaagggaagagtttttttcctttgaggcacttggtgattagtatcctgtgttagcctagacttccataaaaacatacagaccgggggccggacgcggtggctcacgccggtaatcccagcactttgagaggctgagccaggcagatcacctgaggtcaggagtttgagaccagcctgaacaacatggaggaaccccatctctactaaaaatacaaaatcagccgggcatggtggcgcatgcctgtaatcccagctactcgggaggctgaggcaggagaatcgcttgaacctgggaggcggaggttgtggtgagccaagatagcaccattgcactgcagcctgggcaacaagagtgaaactctgtctcaaaaaaaaataaataaataatacagactgggcagcttaaaccattgatagttatttcccagcctccagacagttctagagactggaagcccaaaatcagtgagccatcagggttggtgtccggtcaagcctctcctcccaacttgtatgcagccaacttggcgtgttctcacaatggcctttctgctgtgtctgcagagagggagagatctctggtgtatcttcctccttttgcaaagacaccagtcctctgggattagggccccacccttatcacctcagttaaccttaatcacctctttaaaggttctgtctccaaatgaaatcacattggaggtcagggcttcaacatgtgaatgctggggggacacaattcagtctcacatatgcagtggaaagaagttgacacactgagcagagcttttgcatctcctagggttggggagacaataattggtgacagcccacaagatagggagactctgatgagtgacccagaccttcagctgagagcactgagggctgcaataggggaggaaggctgaggggtgagtagatcgtccctctcaaagtctgaaaccaagcttccaaagggctgactcccagactaagttgatctgctctctttcccacagccagcccaaagcaaaaggaaatatgcagaggtaaatagcatcatccagggcctcaaattaactaaaatatttccatatacaatatccagatttaaagtttacaaagaaaaccaggagacaaatgatccaaaaccaaaaaatatatatataaataaagtaggaataattccatgggattatcatgtcaacaggatattgacattatcatacactttaaggtaatgtgattaatatgttcaagaaaatagattatgagatggaaatgttcagcagagaagtggggtatataaaaaacaatttaatggaaattaaaaaaacaatagctgaagttataaattcaatggatgggtttgaaacagattagacacagtgaaagagatgattaatgaactgaaagataggtcagaagaaaatattcaggctgggtgcagtgtaatcccagcactttgggaggcggaggtgggtggatcaccggaggtcaggagtttaagaccagcctggccaatatggcaaaaccccatctctactaaaaatacaaaaaattagccaggcatggtggtgggcacctgtaatttcttgaacccaggagatggaagttgcagtgagctgagatcacgccattgcacactagcctgggcaacagagcaagactctgtctcaaaaaaaaattgatcaaaggtaacaaaacacagattacaaatgtactatcaacatcaatcagaatagattaaaaaaacacgtggttacattctaaacctgctgaaaaccaaagacaaagagaatagaagctagacatataaaggagaaactaaaggacttacacctgactttgtgacaaaaccatggaagccaggtgacaatggaattaacatcttcaacgtggtgaaagaaaacagctatctacatagaattttataccaaatgaaaacatcatataaaggcagaagtgaaatgaagatatttcagaaaaagcaaatcatagagatatgtgaaaggcaaataaaaacttgggaccccaattcactctgccaaaaggaaaaaattaagctgaaagctgagtcatgcaagaagctgcctttcttttagttcctaagcagatagctagagataaaaggttaaacatcaccacaagtagctgctctaagttcaccttctcttatggaaagtgccaatttgctgggcataagatgaatacacaattgactcctccccaccggctccttttctcttgcaccatgtacattcagtcatgtgaccacacccttcctctttcccctctagcccacttttcctctttaaatactgaagccctcagagtcatctttggagaaaggcacagaccacaggctgtttctgtgattccatgcttttttctcccaggagttgttcttaaccttggcaaagtaaacttctaaattgattgagacctgtctcagatactttttggtttgcagaattaactgccagaaagcatacactaaaataaatactaaaaggatttcttcagcagagggaaagtggccctggacggaagtatgaagtacaggaaggaatgaagaacaataaaaagcctgcatatctgggtaaatctaaatagacaatgactgcatagaacaacaataataatgtcttctggagttctaaatagatgtggaattagaagaagtgataatgacagcacgaggcaggaggaattaacgtgttctagggttgttgcagtatctaaaaagtggtaaagggggttctagcaggtgagggatgtctgagctgaagcctgaggataaagaagagcctgccgctctccctctccctctccccacggtctccctctccccacggtctccctctccccctctttccacggtctccctctgatgccgagccgaagctggactgtactgctgccatctcggctcactgcaacctccctgcctgattctcctgcctcagcctgccgagtgcctgggattgcaggcccgcgccgccacgcctgactggttttcgtatttttttggtggagacggggtttcgctgtgttggcggggctggcctccagctcctaaccgcaagtgatccgccagcctcggcctccggaggtgccgggattgcagacggtgtctggttcactcagtgctcaatggtgcccaggctggagtgcagtggcgtgatctcggcttgctacaacctccacctcccagccgcctgccttggcctcccaaagtgccgagagtgcagcctctgcccggccgccaccccgtctgggaattgaggagcgtctctgcctggccgcctatcgtctgggacgtgaggagcccctctgcctggctgcccagtctggaaagtgaggagtgtctctgtccggccgccatcccatctaggaagtgaggagcgcctcttcccggccgccatcccatctaggaagtgaggagcgtctctgcccggccgcccatcttctgagatgtggggagcgcctttgccccgccgccctgtctgggatgtgaggagcgcctctgcccggccgcgaccccgtctgggaggtgaggagcgtctctgcccagccgccctgtctgagaagggaggagaccctccgcctggcaaccgccccgtctgagaagtgaggagcccctccgcccggcagccgccccgtctgggaagtgaggagcgtctccgccaggcagccaccccgtccgggagggaggtgggggtcagcccccgccaggccagccgccccgtccgggaggtgaggggcgcctctgcccagccgcccctactgggaagtgaagagcccctctacccggccagccgctccgtccgggagggagttggggggttcagccacccgcccggccagccgccccgtctgggaggtgaggggcgcctctgcccggccagccaccccgtccgggagggaggtgggggggtcagccccccgcccggccagccgccccatccgggagggaggtgggggggtcagccccccgcccggccagccgccccatccgggagggaggtgggggggtcagccccccgcccggccagccgccccgtctgggagggaggtgggggggtcagccccccgcccggccagccgcctcgtccgggaggtgaggggcgcctctgcccggccgcccctactgggaagtgaggagcccctctgcccggccaccaccccgtctgggaggtgtacccaacagctcattgagaacgggccatgatgacaatggcggttttgtggaatagaaaggggggaaaggtggggaaaagattgagaaatcggatggttgccgtgtctgtgtggaaagaagtagacatgggagacttttcattttgttctgtactaagaaaaattcttctgccttgggatcctgttgatctgtgaccttacccccaaccctgtgctctctgaaacatgtgctgtgtccactcagggttaaatggattaagggcggtgcaagatgtgctttgttaaacagatgcttgaaggcagcatgctcgttaagagtcatcaccactccctaatctcaagtacctagggacacaaacactgcggaaggctgcagggtcctctgcctaggaaaaccagagacctttgttcacttgtttatctgctgaccttccctccactattgtcctatgaccctgccaaatccccgtctgtgagaaacactcaagaatgatcaataaaaataaataaataaataaataaataaataattaaaaaaaaagtggtaaaggggaggacagacaagtttaagatattttcagaaatgcaaatattcactgggttttccatccacggatcctcactgaaagaatcatcatggattcactgcagcaaaatgcagatggaactcatgacagggacattcaagcagaatcagtgtgtgctgttgagtggaccgtgcactgcacaactccaggaacatttggaacccaactccaggaacatctggaacccaactccaggaacatcactggttttaaactacagtgtgatcgatgagttctttgagagttctgtattgtttcctggctggaaaagaaaagtgagcaaagaaaccagcaaaagtcatttttaatactaaatactttgtgctgcatactgtaaaaaaaaaaaaatacggtatctgggattaaaatcccagcagattgtaacacagcagatgtaaggtatagatggaggagaaggagacaggaagaagggaagtacaagcatactacagttcttgtctggttcaaggtgaaaacatagataaagatattaatatttgttgatagaataatgggagtttaaacacatataaaaatgctcaagttatgtatgcactttcctgtatgtatgtttcatttcaatgaaaaagtggtttataaagaaaaaaatttacccacctggccaacatggtaaaaccttgtctctactaaaaatacaaaaattagccaggcatggtggcaggcatctgtaatcccagctactcaggaggctgaggcaggagaatctcttgaacccaggaggtggaggtttcagtgagcctagattgtgctactgcactccagcctgggcaacaagagcaagactttgtctcaacaaaaaaaaaaaaaaaaaagaaaaagaaattaggataatctgaaggaaattaaaagtagctttcaaaccactgggagaaaagcaatacagcaaaaatcaaccaatgtaacaaattcattaaaagagatataaacaataaaaataataatggaagacaatgcgtagcacttatgtgaaatgcattcctctgtatctttatatgtattaatgataggaggtagctactattatcgtgccattttacagatgtgggagctgaggcaaaatcatacaaaggtaaggttccacctagaatctagaaatctgggaagagcattgcccctaacctaaaaacagaaacgccgaatgacctacaaaatcatcactgttcttaaatctaccagggagctgaaattgcaatgtaatcaacctgaaatccaaggatagacagggtaattggctcacccttgacaaggaacaggaggaagatggagctgctgtaaaagtggacgagaagaattcagacaaccttattagaaaattgcttaagaccaagcgtgggcttctgtgcgaatacagaaccccaagaactggagacacaatggaggctcaccctgcttataggctcttccacacatcacaccctgggcactcacaggaaaggctggagcatgtgggaggccagaggaagcaatatgtgatggcagaggccctgggaggggaggagccaccactgtggcggggagtaggggaaaaaccccaccagacagtttttccctatggaacagatgccttaagatgccagggagagaggagcagaaaatcctgtcacctagggacctgttgtggctggggaaaacaacaagaaaataattccacctctaagggaggggttgaaacatatgtacactcagcccgtcagaggtcttccatctccagggaaggaacaggattactgaaaaaaattccactctgagactcaaggatgtgagtcctgcctgagactgagcaggaccagggcagagagaaacaagcaagagcagccctcctgagtgaggggcaccaacaggccctgtctcaagggcagacatgcaaagaagacctaagttaaaggtgcagagcaggctcattgagaaaagtcctgcagcaaaccatcctcaaccctaagttcaaggtcatgctaccctcaaggtgaccacagcaacagcaaaactcaaatccagctcaactcctagcttgattgactcaaacccccatgatggcaacctaatggggaatgtccatttccagatagaaatactgttgtctcacatacaatggctggctttcagtaaataattatgaggcacaaaaaaaaaaaaaaaagggaaaagaaaaatcacaaccaggagacaaaaatcagtagaaccagattcagatatgactcagatgcaaggattgtcagataggaatttatcttaaaggttctagtggaaacagtaaacaatatgaatgtcaaggtgaggagcttcagcacagagattgaaatgctaagaaagagtccagtgaaaatgctagagaggaagcccacctccaacaggctcatgaataggctcaacacagccaagaaaagaagcagtgagcttccagataagtccacagaaattatccaagctaaaaaacatgaggaaaaagtggaaaacaaacaaatgaaaacatcagacgtaaaagagcaagcagaagccctggagtaatctcaaatggtctaacatatgtgtaattggagtaacagaagaagaagagagaatgagggagaataattatttttaaaataatggcaaattttttttcaggaataatgaaagacaccacatcacacatccaagttcagaaaaccatagccaggattaaaaatctttttttagaaagaaaacaccatattcagctgctcaaaaccaaagataaagaaaacatcttgaaggcaaatagaaaaaaaaaaaaaaaaaaggacacattacacccagaggaacaaggataagaagtacaacacacttgttagtagaaactatgcaagccagaagacaatgaagtgacatctttcaagactatgaacccagatttctatacccagcaaaacaccttcaaaaatgaagaagagacttccaatgctggacaatacggagcaagctctttccagcctacattcttactgaagacaacggaaagctctggataacacataaaaaagtatctgaggactcgggaaagttaacagtaggaagcaaattagggaatgagactgaaacacaaagaaaaagctggtgagtgatcccaagtatttttcgtctttcatcacccagcttagaccgcaggctgacccctgtgtggaactgcacaacatgtgtggacagaaaaaactacaaaagaaattgttttttttctggccagaggaaaagagaccctgcaagccaaagcatgtggattgaattcagattttttgtttggtttggtttttcacttttttaatctttcccagccctctcccaagagtgtcccgtcatagcgctgcactagggtggcagaatggaccccaaacctcaagagaaatacacattttctggccacagaccctagaagaaaggagccttgtgatccaaagagcattagggaagttcctgttattttcccctctcttttctcttgctgcttagtccatgggcaacgtccctgaaactgtggtggagtatgggtggttaaagttcccagagaaatcccttccttgtaaccagaggactggtaaagggggctcttgggggctggtgaatgtggtagaaatctcagcaaggagagaattgaagacaggggtcccctgactctgtgaatgaatcaaccctgagctgggcatggtgaggcaattcaaagcaacatagcaacagctttgagaaagaactgagagtgaaatcttggcccctgggaggtgggacagagctcgcattctgaaactgacaggacagggtgcttgacaaaacaaaaagaaaaaaataatcatcctccaaaggattttaacaggacccagagtctcacagcatatcaaagtggccagtataagatttagttacttggtatacaaagaacaaggaaaatgtgattaattctcaagggaaatgacaccaacatatgtcaacccaaaatgatgtgggtgttaagatcaccagacaaaaacttttgctggttgctttttgttgctgtttgaatttttttagagatggtgttaccagtggagggtgtccaggttcttggcgttttgaacaatgaattggatgaagcacacaaagcaaggaaagaatggagtgacaaaagcagagacttattgcaaatgaaagtacactccacatggtgggagccgctggagaataacggctcaagaccccttacagaattctcaggggttttgataccctctagagacttcccattggttacttggtgtccatcctatgtaaatgaagtagtggcctgcaaacattctgattggttgtggaaagcaaccaatcagaggctgaagtgaagttacaaagatcacgccctatgcaagtgtatgattggttgcggaaagcaaccagtcagaggctaaaatgaaattacaaagttacgcttctatgcaaacaaagacttggcctgcaatcagtctgattggttgccaatcagaggctgaagtgaagttacaaagttacactcctatgcaaacgtctgattggttgcaggaagcaaccaagcagagataccttcaattttccatctgccacacccaaaaggggtgggggtgggggtgggggtggggggatttgcaaaggcagcctccagttcttttgttacttaggtgtggaaagttggggttttccttctgatttagttctaggaagtcagcatgaattggccttaggttccctgcttccagaccctattctcctgtctcaccggggtcttgctccgtggccctggctggagtgcagtggcaaaatcatagcttgctgcagcctcgaactcctgggctcaaagcgattctcccgcctcaggcttccaagtcactgggactacaggcgtgtgccaccgcacccagctctgctgattgcttatttaagtaaaagttaaactctattgaaatcattagaaagaccaaggttctcagcagagaagtagaaaatatattttttaaagaaactcagaatttaaaaataataatatcaggaactttttaattccctgactagcctcaaaagcagaatggagttgtcagaggaaagattcagcgaacctgaagggaagtcagtagaaatgatccaatgtgaagaacagaaaatattaaaactaaactaaactgagccccagacacctgtgggggaaaaacaaaaggtctaattttcatgtcattttggagtcccagaaagattggtaaagaaaaactgtttgaagaaataaagactcaaaaaaaatcacaaatttagtgaaaagagatcaatgtatagattcaagaagttcagcaaaccccaaagaagataaactcaaaaccacaatcaggaacgtgataatcaaagataaagaaaaaagtcttgcagtcagccagaggagaacagtacctcaccttcaggggaagcagttcgagccactgcacactcctcatcagaaaccgtgcaggccaggaggcagaaatgaccctgtgaaagcgccgaaggcaattcagttcagaatttaatatctagtgaaaatgctcttcaggaaaggcagtgaaaagacattctcagacgaaagaaaataaagagaatttatagccagcaggctatgttttaagaaatgataaggaagttcttgaggcagaagggtatacgataaccagacaaggaagtgaagaaccccagaatggttaaaattaactaaatatagaaaacatttgttccagatttttaatcatctgaaagataattaactgtttaaaacaggaaccaacaaactttttctgcaaaagaacagacagtaaatattttatgctttcctagccaaaggctgggagagtcctcaactctttaaacaattctcatcacagaaatggcccagcacggggactcacgcctgcaatcccagcactttgggaggccgagataggaggatcacttgagaccaggagttcaagaccaacctgggcaacatagtgagacccccatctctacaaagaaataatattattttattttattttttgagatggaggattgctgtgtcgcccaggctggagtgcagtggtgcaatctcagctcgctgtaacctctgcctcctgggttcaagcaatcctcctgcctcagcctcctgagtagctgggcagcacaggtgtgcggcaccatgcctggctaatttttgtatttttagtagagacggggtttcaccatattggccaggctggtcttgaactcctgacctcatgatccgcccgcctcagcctcccaaagtgctgggattacaggcataagccaccgtgcccggcctagaaataatataattttaaaaaagaaaggcaaagtcctgtgggagaaagaatacctagatgccgaggcaagagactaaaggcacaaactgtttcagtataataaagaaaatagaataagaatagtcataatacaaattagatatacagatgatcatggacaattatcaatcattattataaacattattaatcattagcttttaacattactctttgttacattactaatataacctaggaataaccggcggacatagggtcaggtgctgaagggacattgtgagaagtgacctagaaggcaagaggtgagccctctgtcgcgcccgcataggggccgcttgagggctccttggtgaagcggtaacgccggtgtctgggaaggcacctgttacttagcagacctcgaaaaggagtctcctttccttggaggagtcagggaacactctgctccaccagcttcttgtggaaggctggatattatcccggcctgcccgcagtcatccggaggcctaaacccctccctgtggtgcttcagtggtcatgctccttgtccactttcatgctcctcccgtactcctggttcctctttgaagatagcggtagaaaaaatagtggaagtcttaaagtgtttaatctttcttgtaaatgcagagaagaaaacgctgatgtatgctgccttctgtctctgctttggctacctaagagggaagggccccctgtcctatgatcacgtgacttgcttcaccttgtcaatcccttagaagattcaccctccttaccctgcccccttgtcttgtatgcgataaatatcagcacgcccagcggttcggggccactatcggtctcctcgtcttggtggtagtggtcccctgggcccagctgctttctctttatctctttgtcttgtgtctttatttattacaatctctcgtctcggcacatggggagaacacctgctaagccctgtagggctggaccctacagagtcctttggactgttttttttggggggagggggacggagtctctctctgttactctgtcacccaggctggagtgcagtggcgcgatctcggctcactgcaagctccgcctcccgggttcccgccattctcctgcctcagcctcccgagtagctgggactacaggcacccctaccatgcccggctaattttttgtaatttttagtagagacagggttttaccgtgttagccaggatggtctcgatctcctgacctcgtgatccgcccgcctcggcctcccaaagtgctgggattacaggcgtgagccaccgcgcccggccccttttgacattttacatttaaagtgtttaaaatgtaaaaaccaaataaataaataaataaaataaaataaaatgtaaaaaccattcttagctcgtaggtagactgcacttcatccatgggccatcgtttgccaacccttggtctaaaacagacagttgccatatagttggtttacagcatttgtaaacgtcaatcataactcagcattgttatggtgatgacgtcgtcattggttatgacatcatctatagattcaacataaccccaaccaaaatctcagcaggactttttgtagaaatcaacactctgattctaaaagttctagggaaaggcaaaggaactagaaaagttcagggaaatttaaggaactagaatagccaaacagttttgcaaagaacagaatcagagaactcaccatacctgacttgaagtcttaatataaagtcacagtcatcaaatgtgaagtgacaggcacacagatcactatccctgaacacactgacagatcagaggtggacacacacacaaatggcccgttgatttttcacacaggtgcagcgacaatgcactggacagaagacatctttctgtgcacagagagacctccacgccgacctcagtggggagaatatgcctttccgtgcacggagagacctccacgccaacactggtgaaggaaatatgcctttccgtgcacggagagacctccacactgacactggtggagagaagacgcctttctgtacatagacagacctccacactgacatcaggcccggtccctgatgacgaaaggcccattttcctcacgatgcgcccgccacctcccactgcttcctgaccccaaacaaggtcacatcccaacacggaatgctgcagggttgcaagccctcaccaacgtgttcaggccagggttggagaaatatatagcgtaccaagcctggcaggtgaaataaggctggattgggccgggggcactgacctaggacatagggattactgtgttgcatgaggtacttggaaatgagttcctcatctggctgatagactctcgggctccactgtggccaattagcttgacacgatggccttcctggcgtcctccgtgtgtggcccctgcaccagcggcatctacgtcactcagggactggtcccaaaggtggattcttgggccccttcccaggcttgccaaatcagagccttggggacctgtgtcctggcgagccctccagagggttcccatgctgtgagtgtgagatgcgagttatgtgtgaattctttaggaatcctgctgacacgcagcctctgacccagcaggtcctcggtggggatggacactaggtactccaggtgctccaggtgctgccagtgctgctgctggagggggtgcctgcgaggagcctctggagcagggttctcagctttggctagacattggattcacctggagagtaaaaagaaacactcgtgccaggcccgcgaggtccatgcgttggtgcagggtctggcagtgcaggtataaacactcctcggtgattccatcgtgtagccaaggcggagtcgctgccacagagggtgaagcggaacgctcacggagataggcgctgggcggtttgtgtgcagcctgcctgctctctcccggccacatccggacactccctgaaccaggtcattaaggcgtgggaaggctcacagttccctggtgagatttctgaggcccaagacgttgcaagggagacgggctcccagatctcaggggcgacgacaagaacccggcgtgctggatgccaggtgtcagcactgaacgtgagagacagtgggagtgggcatcgctgtaagccacggagggagaggaactcagagctgcctgagccacagcgatggtcgtggtggtgaatccatcacaaggagacagaggcaaagctaccaagctattgcctgacatctacaggcaggaaaactctaggtctgttggtcaaaacccaactggaatcaccacagtggggcctcctgagcatcttcccgaggtgcctgggactttgaagggggagcctcccatgggtgtgggccacagatcagcccctgctccttccaaggccccctggccattttcaagggtcacggagttccagggaaggacagcaccctccagggttattaggtgctggttctgcagggcctggccagccagcaaggtccctggctggagtagggtctccccgcagtcgaccatacagtgggcccagcaggaacacacacatttagcaactggcggagtctcctctcttcactgtcgttgcagaaagggccgagtgagaccacgtgcacctgcagcccccacccctccccaaccttaccccacccctgcagcccccaccccaccccacccctgcagcccccaccccaccccacccctgcagcccccaccccaccccgtccccaccccgtccccaccccaccccaccccacccgtgcagcccccaccacacccctgaccccaccatccctgcagcccccaccccaccccatccccaccctacccctgcagcccccaccccacccctgcagcccccaccccaccccgtccccaccccaccccaccccacccctgcagcccccaccacacccctgaccccaccatccctgcagcccccaccccaccccatccccaccctaccccacccctgcagcccccaccccaccccacccctgcagcccccaccccacccctgaccccaccccacccctgcagcccccaccccaccccatccccaccccaccccacccctgcagcccccaccccacccctgtccccacccctgtcccagagagagggaactagagacactaccagagcctgggaactgtggaggtcaaggtgccagtcaaggcttgcatgacacgcagtgcccgtgttgtgagcagaatcgtgtctccctaaattccagtgttgagatccaaacccctgggacctcagtgggactgtgtttggagacaggctccctacagagatgattatgttaaagtaggtcactaggctggtccctggccccatctgactgaagtccttgtaagagcagatgaggacacagaccacgtgaggaccgggggaggagatgccgtctgcacgcccaggagagaggcctcaggaggaaccggccctgccgctccaggacctcagacatgcagttttcagggctgagagggagccagtgtctgtgtgagccacctggctgtggcgtctgtcctggcagctgcagcacacacaccccacggtccacgaacccccttcacagctgtcgccagagccacgtggggcttggagaagaactggattgtcacgctctcagtcaggtggtgatgccagtcacgcgaggctccgaggcagcaggtttcaggggcacctccgtgcagtccccggcacccagggtgcagcccccagcacctccgtgtagcccccgacacccagggtgcagcccccggcacctccgtgtagcccccggcacccaggcagtccccggcacctccgtgtagctcccggcacccagggtgcagctcctggcccggcctctgctttgccggttgcttccagtcctagcagcaaagatcgcagagcctctgtcctcttggggtgcggggcagagcacgggcaccatctcctcagggctgggcccccgttcttgccctacgactctgcagagacaatcgtgtgactcgcagctcatgaattagcctggtagacaggaggccggagaagcccggatgcctggcctgggtgcccgtgtgtcccaggggacagaccctgcccagcccaggggcctgccatgctctctggacgtgttgggatgtctgagggtggggcaagagagagagaaggagagggagaaagggagagaggagcggagaaggaaagaaaggtaaagaaggagagggtggggtggagagagagaggggggacagggctgctgtaggtccctgtggccacggcacagggtggctgtgggctggggggcctaaggttggggccggcctattccttgtgtgggtgtgtggctctgacccagcagcagggccatgcctttgcccgttggagcccggcttggagcaggagcaggtggggtgtagggccaggctgcggcaccagtggccctggggcctgggaacctgcctgcggtgcaggcgtctgcccttcctagaggaggcgctgggtgagaccctccagggtgtttggggccaagctgtgcgcacctctgatgccagctgttctcggtttggaaagcgctcactgtgcatgtggcgctgggggctgagctgcacgttccaggccccccccccaggccccccgcacacatcgtggcccacagccatgagcctcgcagcaccaccataaaggggaatcataaatagggaccaggtcccagaaggtgcacacagcgcgcagggcaccagcgcccgggtacgccccgcccaccgctcccagtctcacccctcccagactcacccctcccagactcacccctcccagactcacccctcccagactcacccctggggctgctggccccgcccacccctcctaggctcaaccctggggctgctggtcccgcagagctgggcagctgctgcctcaaagcctggccaggcagccggagcgggcaggggatccccggagcagaacttcaggttgaacatgggcttccacctcacgtggaaggaagacagctgaggcgtgggtgtgaacaggctcttgggcagtggctgtcaggagcccaaggccaggggcatgcacagagcagggctggagggtcgctgagcaggggcctggggaggctgtgtggctgggcctctcagagccatcagaatgtgacaaacttccagccccaccaaaggccaccaggggcacccactgcagaggaggcccctgctcaagtggaaggtggcctgtcccctaggcctgtccccaggccccccatccgcccttgtcaatgggtccatgtacaaggtgggcacggtgactcgcgggggctctgcaccttcacccccttcccaagcctgctccgtctgctctcccaaggcctggcatggcactgtcgtcggccctcctgcccggtcactgtgagctggccactcctctcgactggtggggtagtggtggctgccagcgaccaccccctccccgtgccccttcaggcccagcggtggcgaaggctcccactgtgccatcaggggctgccatccgtcatgctcaaccccgcccacacctctgtaaggaactccgtgattagatttgcctgtgctttttgtggtcaacagtttcacctggactgagccaggcagttcctttgctggctttgcctgggctcactgacatggccgtggtcagctgctggcccaatgagggctggacagtctgagatgacctcggccacatgtctggtgtgtggtgctggctgcggctgggctcccatctccagcaggagagcctgggcttctccacccagcagcattcccagaggggagaggagagacacaaggcctcttggagcccaggaaagtcccttccatcacattctgtgtgagccacacacagccagccaaccagcgtgggaggggaccaagagacgagattccctgacggccatcacgcagccacggaccacagtaatagcatagagaaaagagactccgtcagtagatctgactctgctcctatgaaaagtgaataaaatggaaaagttcacaagtctgaaaaagaaagaatggaaaaagcagtaggaactttaaacggtgaggctgggtgcagtggggtcgctacacctggaatcccagtgaggcaggaggatcacctgagcccaggagttcaagaccagcctgggcaacatagtgagaccctatctctacaaaaaaattaaccaggcgtggtggtgtgcacctatagaccctgctactcaggaggctgaagcaggaggattgcttgagcctgggagtttaagaccacagtgagctaccatcatgccactgcactcagcctgggtgatagagtaagaccctgcctctgaaaaaaaaaaaaaaaaaaaaggatattggccaggcgcggtggctcacacctgtaatcccagcactttgggaggccaaggcaggcggatcacgaagtcaggagttcgagaccatcgtggctaacatggtgaaaccctgtctgtactaaaaacataaaaaaattagccgggcgtggtggcgggctcccgtagtcccagttactcgggaggctgaggcaggagaatggcgtgaacccaggaggcagagcttgtagtgagtcgagattgcgccactgtactccagcctgggcgacagagcgagactcgtctcaaaaaaaaaaaaaacaaaaaaaaaacttagacaacctgaatagaccaataaccatggaagaaactgaggcagtattaaaatactcaactcccctaaaaaagacagtgcctccagatgctttaaagatcttccacaacatagaaaaccatggaaactttccactacaactccagcatgaccctgatgtccaaacctacaaggacagcacaaaaaacagaaacatacgccagcctcatgagtacagggcgcaaaacccttaaataaaacgtgcgaatcaaattcactgatgtgcacctgtggtctcagctactcggaaggcagaggcaggaggatcacttgaggccagaagctcaagacccacctggtgaacccatagcaaaacccacctctacaaattttaaaagaaaaattacccgtgtattaaaatagttgttcattctgccgctttcactgccccagctcagcagactggccgaaggacggccgaccaccccctccacctatcggctctgtctgggccctcaataggttggatggtcccacctgtgctcgggagagggttggctttcctgggtccaccaaatccaatgctgacctgtcagcaccctcacagacacacccagaaacacatgtaaccagctatcaggcatcctgtggcccagtcaattgacacataaaattaagcatcactgggggctctgctgcacatgcctcacgtggtgacttccgggggtctccagaaagcagagcctgggacaaggccttggaagtagtttctttggggggtggtctattgaggtaggagtgtgggggtggggagtgtgagtcgggccgggaggaagcatcaggaagcgtgagcacagagctgtgggctgcaggtggggccggggctcattgctgctgggaccctcaaggaaccaggcccagaggctggggcagcccctcctgtgaggactgagccccaaggcacacagccctggatggtcaggcccggctgtggggccctgccctgggcacagccatggccacctctgctgctgatccagccacagttaacgagattctcttctcccgggtggatgcctccctgaatcccgttacctatagagaaaccggaagcggcagctcacagcatctccccagctggccacgtgcagggcttctgagagctgcatggttctgtggggtggctcaggtgtctctgggacagtgtccccttgctgataatgtccccactcattcccagcattgagattatggagcaagagacaatggcagggagaaagcatcccagggagcagacctgggtccacgtcttgagcctccagcctccacctggcgaccctcacaagggcggcgtcagcagtgtcagtgatgttcttgttcttggtgctgtcgcctgaattggccaagctccgattccacgtgtgtaatggtggtggcattcctcccatactgctggtctgcaggagcacctggggattaaacaaggttgtgagtgaggccccgacatcagcaggcgggcagtaagggattgctgccacttcggttgtgcgtggtgttccatccttaaaagtaaagggctggggtgaggggcaagaggggagattgtggaatctccaccaaattttctcctgttctcagatgaacgtttagtttgcagaggctgtacatcattaaacacagccacgagtcgcttaggcacagggattgaggagtgcggcgttgggtggtttggtccctgtgcacacatcacggagtgcacgcacacacacctaggtgggaaagactgtgtgctcagggtgcctgatggaggggatcactctgggctgcaaactttacagcatgttactgtgtgggaactgcaggcaactggaacgcagtggccagaatttatgtatccggacacagagaaggtaccataaacctacagaattggaaccttatggaaccaccgttgtgcatgcagtcagtccaccaaaatcttatgtggtgtgtgactgtttacctttctagatcattacagactattttctgattcattttttccacgtgattaaagcccaaattgaggatttcagtgggatttaatgcgctttccagatcccttgggaaacacagaacatttaccacccgcagcttcccagggtgcagtacagctccatctcccccacacatcacgtgcaacagaccccagacctggtttcctgtgtgactaaacgtgcccagcccagcaacagcccctcacccccgtcacgccttcggtgaattgccaacatcgactcccagagcaacctgcaggcgccggtgtcatggacacaggtggcctgagaaatgtgggtgccttttcccctcctgaggctctcctttagggttagggcccaccagatgctttttttttttttttttgagaaatgggctctcactatgttgcccaggctggtcttgaactcctgggttcaagtgatcctcccaccttggcctcccaaggcactaggattacaggcaggaaccgttgtgccagcctgtcttggaaggcaaacactttactatctccatacaaacccagaacggggctgggcaggcagggccccacctgctcctacgttttggctctccttgccctccatgggcaatttgtacccgtgaaggggctttgctcttggggtctgctctggggtttcccggacattttattgatggcttcatcctagggcacgcgccctggaagcaggcatggtcctgggaacgtcccataggtcagcgggctcttcatcatcaatctgaacaggtcccttcccaattcccaatgagggagtgaaggaaagacaggagccctcacctcccagatggagaccagcccccacagagacccactagccttgtggggggacccctcgccacggagggcccagcttggcaagcagtcggcttcagcactgcagcctggaggatggcgtctggaagtcggctccatgttctcagcctttggatttgggacaggtgccacacaagccttgcacaaggggtacagaagtgtttgagtccccagattctcactctagggctttttagactctaataacgccctaatttggtgtttcctgacagcgaggtatgtctgcctgactccccgagcccgtttctgtgtcttctgccctgcaagtgaccgttttcctcagctccatggctgtggccctgggtagccacctccacggcgagcctgggctccctggagctttctggacctggcagtgagctcagggttgcaaggccctcaggcagccaagatctgcacctaggcggctgtgaggccgacacacgtcaccgccttcaagcctctgcctcatcccaagcctctctgcaattatttactgcgtagtttttctttgaatgatgtcgggtttttttaaagtagaaaacgtcactgctttaaataacattaatagagtgtgctatggactaaactgtgtcccccccaaaacccatgggttgaagccccaaccccccaagtgacttagctggagatggggccttgccgaggggactgtgtcctcaggagaagaaagagtgagtctctctctctgtctctctctccatctctaactgtgtcctcgggaaaagaaagaatgaggctttctctctcacctgtgttctcaggagaagaaagagtgagtctctctctctgtctctctctccatctctgtgtcctcaggagaagagtgaggcttgcttgctcgcttgctctctctctttttctctctctctccccatcaccctccgaaagtgcacccctgggcacacagtgagaagggctgcgagccagggacagaacttccagaaccctgagcttggcttccagcctcctgggcagctagaattcagtgtctgtggctgaagcgccccagcttggggtattttgctaaagcaggcccagctgataagacaaggaaaacccttggccgggcacggtggctcacgcctgtaatcccagcactttgggaggccgaggcgggcagatcacgaggtcaggagatcaagaccatcctggctaacacgatgaaaccccgtctctactaaaaaaaaaatacaacaaaattagccaggcgtggtggcgggcgcctgtagtcccagctactcggaggctgaggcaggagaatggcgtgaacccgggaggcggagcttgcagtgagccgagatcgtgccattgcactccagcctgggggacaaagcgagactccgtctcaaaaaaaaaaagacaaggaaaaaaggaaaacccctcaccacccacagggcacaggcggcctcccaccaccgccaccgaatcaggcccagagtctgacctaggaccccctcccctgcagcccctgacctcctctccgcttcccattcctcctcggccgaaatctcagcccctgaaccaagccccgcctgactcctgcctgggtcaaaccctactccggcctggactccaaacgccgggagtccgtctgagcacttcccgtctggaaacatcagcagggtcacactcattcctggggcaggggacgtgcagcccccgactctgggcggctcaggtctctgtgcccaccccatgcccagcctgatacacaacggtttctcctttgcagatttgttacaggaccctaacacgtacccagaggcagccgtcaggtcagggtttccgcactagagtcccttccgtggtcgctagaaatatgttacaggaatgaggtttggctccagaccccaagggagggctcctggatctcgtgcaagaaagaattcagggcaagtccacagtgcaaagcaatagcaagtttattgcaaaagtaaagtggtcaaagaatagctcctccgtagacagagcagggcattcccggaagtaagagggggaacgcgtgcaccgtaggtgcggtgctggtgtacacggggaggcgtgctcggatgcaagggtttgtgataaaggattaattttctttctttcttttttttttttttgagacagagtctcactctgttgcccaggctggaatgcagtggcatgatctcagctcactgcaacctctccgcctccccggttcaagcgcttctcgtgtctcagcctcccgagtagctgggaatacaggtgcccgccaccacgcccggctgatttttgtatttttagtagagacggggtttcgccatgttggccaggctggtctcgaactcttgacctcaggtgatccacccacctcggcctctcaaagcgctgggattacagacgtgagccaccgcacccagcctattttcttaattactatattttgccaggatcgatattatctttaaagcaaaattaggaatgcctttgttctccagatatgggctatctggacactcccaagtctgagtctgtgtagtaaacattactaacctgttcccttaaccgtaaacatccagaggccaggaatgccagactttctgagaatgcagcccaccaagtcccagaccctactcaagatggagtcactctggttcgaacgcttctgacagatgtgtccaatgcatggatgaaattctgccaagatgttctgcatcttgtgcaacccctccaacccctttcctcccgagtgtgcatttcatccccattctgtctggcttctgtggacgcaggagggctgttcccgcctgctcaggagggaggcggggaggagtggacgggggagaggggccccccacgcctctctgggctcagggtcccatctggtcctcacagggctggggcttcccatctgaggtccccggcagtgcatccaacaagccaaagtggaaacaaccgccaggcgccacccaggccctgggtgagggcgggaccacggaccccaggactcctccccgcagagactccgcagggtcctcctgctctttccacacccagcacccgcaaacggagcgggggcggggccgggcttccaaaagtccctgtggccaggaaggaagggcgtgtcctgggccggagcgccggggctgggcccctgggattctctgcgtccagcagcacagcagggtcctccacagccgtgccccgtgctctggccctggcagcctggaggcggcggcggtgatcaccggtctgttctggagagagggcagctactccatggcgccctcttggagaaaatttcatgaaccagacacctccggccaggccagcccttcctcatgcaggtccctgaagcctcatcagcaaagcccactctcagaaaaattcttttcattgtttactaagtgccactacatggaagctgagagaaataggatttgtggaagagagtactgcagaatactgctattggctgtattttacgattatctctagttagaaattgtttcttggtattcaaggtttaaaagaacaaaaaatctgcagcctgatggtgggttaagtaacattctgtagctttggagagtggaaaaccatcagaccaagtaagtactggctgagctggcagctctgacgttcctctgtgacacgggcttttattctgcgcacgtgtcgggatctgcctgtactgagaggttccgcgcggcttcgttaaaacggctttgaggaggaagtggagatcctgttagacaggagtcatctccatgcacagacggccccagaggtgcccccacccgcgtgggaagcgactgcctaggtcccagggggtgaccagctcttgtcagtggaatgagttgaggggagagtcacttccaactgggggcttctccccatctgctggagggatggactccaagagccctggggaggcagagccacagatgagggcttggagtctggctctggggtgtgagccactgtgcgtgtgggagtcatccacatgaggacctgagggtgacagacgtgctgccaaagtccatgtggctcacgggctgcttccatccttccggacgtggctggctctgattcaaaggctgttttgtggggcctgttccccagcgaatgcatgggaccacagaccaaggggggcagcaggcagtccactcggggacctgggccacccgtcaggctcaagcagacacctttgtgtcacaatgacctgaccacccccgtcaggctcaagcagacacctttgtgtcacaatgagggctccccctgaagaggtggctgccccaagtcactctgggctcacggtggatgcatggtggacagcggccgcacggtggcctttgtgatggactctggggcagacaggcttctctgtaacatgggccttgcagagctagtccagaatgctgggggtgcactgggtacctgctgggaccgcccgtcaagtgagcaccgagaactgaactgccacggccaccgcctgactgcggcctgcaagcagcaccattcggcagaggggggactgcaggcgtgctgccaggctgggggtcaggggagccccaggaccacctgcagcaggacaagagcgtgtctcaccaccctcctgctgccttctcagaagctgtgtctgcccccggcccgaagccagtgacaggatggagtcaacatcccgcccactcttctggcctccccacttcacacccaggcccagtccttgccttcagccgctgtggtccccatgttctcgcctctgcccaggccagccccagtctgtctgtcctcgagtgtgctgaacacactggacaccccactcccctccatctgtcctgccagggattagatccccacagtcaggcatcttctttggagggaaatttggcagattctagtcaacgtttcaagtacacatcacacaccctttgatccagaattctacttctagaagctgacctcacagctgagtcaaatgccacaccgaggcagcacgaactggactgcaggtggaagctacgcctcccaaagcagacgggtgggactgggtgaggacactgacggtcctgagaagccctgcacctggtgccccacggaggccgaaggacagactggctttggaaggcacacaagaccagctaacagggacgctggcctgggcacccacagtgactgcatttttatttttagtttttgagacagagtctcgctctgttgcccaggctggagtgcaatggcatggtctcagctcactgcaacctccacctcctgggttcaagcagttcaccagcctcagcctcccgagtagctgggattacaggcgtacaccaccacactcggctaatttttgtatttttagcggaaacgaggtttcaccatgttggccaggctggtctcgaactcctgacctcaggtgatccgcccgcctcggcctcctaaagtgctggaattacaggtgtgaggcaccacgcccggccagtgactgtatttttaacctgcacgatattttttttttttgaagagcagacatcagagaggaagtattttactcaccaaccattccttttaaagcagaaatctcagtgtaatcagaaaacttccaactttataatttttttttttgagacagtgtttttgctctcgtcgcccaggctggagtgcaatggcatggtctcagctcactgcaaccgccacctcctgggttcaagtgattctactgcctcagcctcccgagtagctgggattacaggcgcacgccaccacgcccggctaattttttctatttttagtagagacagggtttcaccatgttggtcaggctggtcttaaactcctgacctgagtgatccacaagccttggcctcccaaagtgctgggattacaggcgtgagcactgtgcccggccagaaaatttgcaacttcttaaacgattctaagcctaatgtttctgacaaggatgagcctctcaaacgagatactgggcactaagaccacaccatagcagtgcgtctgggggcagcaccatggcagtgtgtctgggggcaggagtcgcaacctcacgtctccccgttccagatgcaagtctgcagttgccacacattcctgaatgagccggaagcgggtcgagcacagggggtttccgccgcagacgggctggtgctcgtagccacaaacgctgggccctgcggggcaggtccacgggacagacagacataccaatactctgctgctcggactcaaccctgtgtcccagaggactgaagtggcaggagcaacacagaagggggccggggtgggggggcactccctaaaaacctggcacggagacacccagggaaggacgcgaggggagcagggagcgcgggagcctcatgcaggtgtgcgtttcacacgggggggccaaggtcgcccttcccgaggcagccctgccttctcccccggccctcggcacccagcgcgagtggagggcatgcggtgcgcagggcagctgtggagggcagagacagccaagacctcccctgcgaggcaggcccgtgggcacagttttaggacacagcctggtccgttctgacagccacaggcatttagtctggagactgcccaggcatcccacgatgggtcagaggcccactttacccaaaaaagcctacctgcctcccagcattccaagcggtcatgtcgacaccactgagatggaacacaggaacacgcagcatactaaacacacgcaggtagtaaaccgttttattggaaactggttaaaaattaaggcactccaagctttatggtttccttgaggttacagttttgtggctgctcttagtgtatttcagaaaaaagcagatggacgaagaccgaccttacagacgtgggtttctacactgagcgcaagggctgactacgctgtatttcacaaccgagccctagcgccagctcagcaccctacgctcaggaagcggattttgcacacacactactgcattcatacagagttcactgaagtctattaccaagtgtcttttatgaataaacaatacaaagtccaattttgatggctgctataaaatacttaggaatctctgcaatactttactacaaatacaaatgcccaagaggtcagggaaatcagcctgaagaactgggtacaggttctattctttgtggaaatttcagcctaggaatgttattcccggtacagatgtacacagtcaaaaaggcttatcgagctgtttgacgagttcttgaagtgttctggatcagtgatctgcctgtgaactttagttcacgctgaagacagtcttctcagttttcatgactgtgaagtgtgaaaatggaacgcatccttgatcttaggtgctgctgacctactttcccaaagcaaaatgttttaaaattcaaggcaatctggaacagggactatttccaaacttccttaggcagcacttttcagtgacttccccgcacgctgctttccctgccacgaagcgcttggtctgcttactaaagccacgtatcctgattttacagaaacgtgggcaggtccagcagtgccactggagagctcccagagaagcccactcagaaggaagtggtcagaccaccctcgagccagagcggctggaagctggactggtcccatgaggcagaaggagcaccagcgcctgctgggtggtgtggggagagccctcagctgactctggacacacctgcttccggggcacgtggcccagagccgggcctgtggacgggcctttctttcttcttggggtggaccccgtccccacgatccctaaatggccaccccccagacagcccaacaggcagcgagaggcctgcaggcactgaggatgccaacagggctggagagagctgcagcgtcctgccccgtcctccccacaccgctggcacacgagcagtcaactggtgctgctgaggcaggccaaacaccacatttataattcaagcttccaagggaaaaagattctcatgttctagtaaagatacaaattttaaaaattgtccaaaaagggcctgaatttttatatgaaggttttctggtgaaatcttttaagcagggaggaaaatccaataaatttttttaaaaaggtttagctattccccaatgctatttaatacaattgaggttaggacgttaagtccttatcagactgtgtactggagccccgtgtcatcagcaaaagccgtgtgagtcaacaggtgtgaagactcaagatgcgcacacagacgctgtccgtggttttatggggaatgatgagggctggtcagttctcctcatgacaaaagtcaaaccgacttccctgtgttgcgtgtgaagcttgttagtggacagagagaaacgcagggttctgccctgggagaatgacagccacagcgctgggtgccgtcaggcggcttcgtgtgcagttagcgtttcacaaactgagaagagtataaaaaagcccaaaccccaaagatttcttatttcaagtgactaaatctagaaacagagatgaacagggaatagaaggtcaccagtctgcaagacgagaggactgtccttcaggggcagctctccggccgcctgtcctggaaggctggcaggttcactggccaaggtcaggagaccgcaatggccacgtggtctcccggctgggctgggctgcggagcgtgcacctcacaggaagcgtcgggactgatgtgctggagcgctttagttgttttcaaatctagcatacgggttttcttctttaaacaggcctgaaacaaaataaacttgaatcataacttcattcattcaaccagaaacaaaatcttagaaagccatacaaaccaagctttataagaagatttactgaggctatagcaacaacgggcattgtaagcaggctctcatacagtgcttaaccttttttgaagtcaaaccactttaaactttaaaactgaaataaaatttactagaaacaagaactctaacagatcctaagagataagcacttacttcctgatgctcggcgaagaaaagaaatttaaggcaagtatttctttccacagtggttggctagttccacagtggatggctactattaaacaaaataaccttactttgtgcttatagctgctcttaaacctttggaattaaggctacagaaagaactaagatgaccatcaatctaactctcgagtactctgacaaaactgggataaaatgtgtatttaatcataagagtaaacctgtgctacttacccaaagaccaggagttttcccttcacactgcagaaacacacacacatacacacactctctctccctttattttttatttttttttgagacagagttttgctcttgttgcccaggatagagtgcaatggcgcagtctcggctcactgcaatctccgcctcctgggttcaaggaattctcctgcctcagcctccgggtagctaggactgcaggcacccaccaccatacttggctaatttttgtatttttagtagagacggggtttcaccatgttggtcaggctggtctcgaactcccaacctcaggtgatccaccaccttggtctcccaaagtgttgggattacaggcgtgagccaccgtgcctggcctctctctccctttaacaatctgtattgtacactaaaattatctgcagcgattacaacaaagctactcactgcatgtattctgggggctgggtggaagaggcggcggggaagcagagggatggtaaggaagggcctagccatgtttctttcttgcctgtcaaggagggccacaggcatcaggctttgggagtgaggctcaaagtcggttttgggaaagagtcatcagatactagcaaggaggctggttaagttcttattgaaaaactcgctcctgagtctacttccagtttagagggaaaaccaaaaccaaaagaagggtttttgcgtgcgtgctggtattttatataactgcaccaggtggactcacatgctttctcgcactctcccatcaggaattcctaggaattcttctaactagccgaggctttccaaagcacaggccattcaatggctttattacaaactggcacaaaaagctcatttcatcaatgcaattaaagggccaaattaaccaccaaaatggcaagtgcaagtcaatcagggccctgacacagaagacaccactccaagagcctggccggccacccacagcctcacacccgctgggagtcagggcacagtaaaggtcgagcaacttaaacacagcttgtgcttggtgataacaggtgctgggcagtgtgtgcgtgtgtgcgcgtgtgcgtgtgtgtgtatccaccttgtcttttatttacattaacattagtctggctgggtgtggtggctcatgcctataatcccagcactctgggaggccgaggcgggcggatcacgaggtcaggagattgagaccatcctggctaacacagtgaaaccccatctctactaaaaaatacaaaaaattagctgggcgtagtggtgggcacctgtagtcccagctactcaggaggctgaggcagaagaatggtgtgaacctgggaggcagagcttgcagtgagctgacatcgcgccactgcactccagcctgggcgacaaggtgagactccgtctcaaaaaaaaaaaaaaaaaaaaattaggtgccaaaaagctcttgactcttccatttcaaggaaagcacaatgcctccagccaaggcctgcagagatgctgctgggcccacgctccacgtacacaggcatgcactcgctgaggagggcaaccctggtgctgctccttatgacagtcacacgcaggtacccggtcaccacccactccagacacacaccgggaaacaacaggcgacagagagggtggggcaaggacaaggcagcagtgaagagaacccagagagtcagcgcccaagcacacggcactcaggagactgatgggcgggaacacataggaaaaagcctctatcagccactgggcatctcgaggccagcagccaaggcagcctcacgcccccaagccgacacttcgagaccggcaggactcacgtggcctcaggtcacagcacagtcacatggaggtgactttccaaggaggccagaactgacagggaggggacgtcccggccagtgggcagagccacccagcgtttacagtccagggcaccagcagcatggggcctctgcagcccccatgagagggaacccaacgccaatcacctgcacctgacggaggcgccgctcacagtggctgctgggctttgccgtccaccccccacccgatgaccgagaaccgcagcgacgtcctcatgcccccagtgggtgggaccctaaaataccacaaatatatgatattccctaaaacaaacagaagactcaaaacacgtgcattagtcagaaaaggctctgaaattttccaattaggtttagcctttaatatactgcttcaaggaaagcaccgtgggcgcaggacgacagattcctgaggcccacggctgccatgaacccaggaccacgcacctcgcacaggcgaggagtcagttcccaccatgtccatgacgccacacaaccacaaacccagcgcgggagacgcccatgacaccacacaaccacaaacccagcgcgggagacactagactctttgcggactttaaaatcatacagaatcaacgaagcacggctgggtggtggtgttcagtgttaagcagtgaacatcacgtggtttgggggagtatagataacgtaatgtgtatttccaattcactccaactaaataaaaggtttacacttggcaaatacattcattctggctccttcaaagctcctctccaaaatctctccagacacaaccaaacaagaacagaacgccgaggctgggcgagaaggagcagggccggtgctggggagtgcttggaaggagcgcctgccacactcagaagatggcaacgagcaacgctcccgaggatgagagggccgccctgaaactcacagcacctcggctacgcaggcgtgcccacaggaagccaaacacgacggcagaacagctgcagacttccagcccagaagtcttgggactcgataagcaaacagctatctgagaaaacagacttcatgaagacgactggctgagataaagatattcttaggagtgagttcaccacagaaccgctggggacaaccgccagctgctcctctctggagagacgtccttctgttccgatgggtgaacccacagccccatctcaggccacactggcactaacgaggaccgagacagcgtgccatcgcctcccaaccagacaaaaaggaggcgtgaccagtccttaccatatttttttctgatttcatcatgtcttgtcttcatctctgctctcctaaaacacagaggaacattatgagcaccaaacgacagcgcacggtggtgtaactgctagacacgcccttccgtgtccctcagtgggggcgccaggtttcttctggtggcttccctccagttcccagagtgaaaccagggtgaggacaagcttggtcatcaggccacatacccaccaggacaggcaaggtgacaacgaacccagtcttcaaaggccgttccaatgtattactctactcttttcaataaaagcaattcaaatgcccaataccgtgatttttaaaaagcttttttcatacaaagaaaacacagtaaaaatcatacaccaggttctgaagatggtgaggaaaatgcgattgtcagcttttacttagtagcatgtgacttcaaggtgactacatggaaaatctgtcccgcttccaccctcgcccgccgccaacctgacagttggcccctcaggtcctctcctttgccaggtgtggattacaccacctcctcctggggttgccccagagccccagcaagcactcaggagagtgctgtgtcaccagggaaagggcgacaggagagctgacccagccacagtcagacgctgtcccctctgagcctcagcttgctcttggcaaatgctgggcctggacgagccgccttagcagccgtcacacacccgtgtcaccgcgcacagactcagccttactgcaccgatgggaggacaccgggcgaggaagcctatagaagcaaggttcgcagccactgctaggttcccatcacagtctctcgctctctaccacgacctagaagatcccctgggcactatacacattcttaatttctaaaaactgaggaaaactcaggatgtatccatgtgatttccatggccttgcagatctgaatcccctcgaagtaaccttcccagcgggcatcaccaccacctcaccgttcctcctgccgtatccgcctctcctcccgctcacgcatggccttctcctcactcctgtccggcttccggctcctcttcctcctgcagcagcagcagcagcagatggcaatgcccaggaggagggttcccccgactaccgacatggtgatgatcagcgcctcaaagttcactggagattcaagcacctggagttagggccgccccagacacagaacccacccagcacagcagccttccctcgcccctggggaacaacctcaggacacaggagcataaggaggaaagccgcctcggccaggctgctggctcctggcgtgtggagagcctgtggccctgcctccaccccacagggtcccgccctctccaagtctcctttcagccacacgttcctatctgtgacttagaatttattaacaatttataatattaaccataatgaactgaagtgacagggtagtctgtctcagctgagtttgaaaaggtatttcaagcctgagaaaagttaactaaccaaaattccaagctacatactcagactctcgtaagacattctaaactcacagaaatggaggttaagcctgatgcagctttctttttttttatttaaaccaaagtcaagaatattacaatgatttacaagagaaatagactctcagggcacatactggcggccaggttcgaaaagaatgaccgtggaggagcggacgagaccacggaacaagacgggatcatcttcaaatctgagtgttttgaggaccttggggctgaagaacggctggctaatcggtcccaaaccctgttatgatttccttaaccagccttcagacacacgtgcacatttaaaacagatcttactatccttttaaacttcttttgaagatctatacattgaaatcagccaagatttttccattcagttcaaaccagaggcaattaaaaaataccctaaaactacttttgcaaatgtgttttcaatcatgtagttcaaacagcctccttggctggacacagtggctcacacctataatcccagcactttgggaggccaaatcgggaggattgcttgagcccaggagttcaacacccgcccagccaacaaagtgagacccagccctgcccatctctacaaaactgtttaacaaattaactgggtgtggtgcatgcacctctggtcccagcgacatgggaggctgaggtgggaggatcgcttgagcttgggaggttgaggctgcagtgagccgtgcctacactattgcactccagcccgggcaacacggcaagacaccatcttgaaacaaacaaaaaacacccagccagcctcctgaagatggctttataagcaaactcccctgggcagtagattaccgcatgattcactgtttttaactacagttaatagctgtgccaccaccacaggtgacaccgtctcacctccaggggctgggagttgaacacttgctgcatgcctgggccctggcaaggaggccgacggccaggcctctggggctcccgcagcctcacccctctgctgccccggacgctgagatccgcatttcttagtttattaaaatagtttgaaaatcaggaataggaggttacatctgatcaaatgccttttgagcttttaatcctgtgttttttcctcctctgacctgttctggaagcgtagaattgcaaaaattatagtaagagggagaactacagaggggaccttcattggcagaagatgtcattttctgactggagaactccaatgagatcaacaagatggctggccttaaaacatatctacccctcagatagcttttctgattagcagctaaaactagttaaaaacaaacagaaatcctgtcacaatgggaaacaaactctgggctccttttgctgattccatagggtaaaacccatgaacttgaacttgaaccaaaggatgtgggagaggcctgaaagagaggcatctttgcctctggacaaacggccaacgctgtagacatttcattttccttcaagtaagcatgtttatcaggccattacaattaaagctccaaaataattttggctagaactggataaaatggttctaaggttacctgtaagaataaacaaggacctgtggtgcaagacctaaaacgggtatcatgtgcgccgcggcatctggtgaaatcaggagggccctgagggcccggccacaactgctcctccccactctgctcccgtgggcaaggctggacaaggtcccagctcagacagcctcttcctcctcccggcagggccaggcacactttctgtttctcccggaggagcaggtgtcagttccctctcagcctcagaattaaccaaacaagcccatcgcaccccaccctcctgtcacgaaatggctgcctccccgagccctgttcccctgcgggaccctgcgtggcgtgtggtgccccctccccactgtgactgtgactagtcacctgctgccgctctcatgtgcagggctgggtgttgtgtgtccatccacttctgcagcctagcgtggggatgtcatttcacaagagaattgtcaaaaacacccaccacttgtaaaggtgctcagcacgatcggctagtcactgcagaaatgcaggtgagaagcacaagacaccactacacacccactagatggactgaacttagggtgactggttaccctaaacattgggaaggatgtggagcaaccaagtcccacattgcctgagggaggccaaactggtacagccactccaaaaacatttggcagacgtactaaggctaaacacaaatatgctccgtgacacagcaactccacccctacactcctccagacgtgagcgcctgtgccggcaccaacacaacaccgctcacagcagcaccagaaggacccaggcgtccctgagtggcagcatggctgaacagctgtagaacactgcacgagaaagataactggtgcaggcaattgacacgaatctcgggcacatgctgaataaaacatccaataaagcacaggatttcctccacataaaggcgggaaccagtaacattaatctgtggtgacgggaagtccagtcagtggctcccatgggggtcctgacaggaattgggccttctgaaagtcctggaagtcctacctactttgctgtgagtggtgataacctgtatacgtatgcaaaaatgcactgaatatatgtacgcacacacgtgtgcattatgtaggctataagccgcggtccatgtaggcacacacgtgtgcattatgtaggctataaactgcggtccatgcaggcacacatgtgtgcattatgtaggctataaagtccatgcagagagagacttcagatgtgtgcacttcatgagaagctacatgccattaaaaacacctccagaacaggtgttccaaagggcaaggctccccaggtccaggagctgtgtcttcagagtggtcattaagagaagttccatggaagggatgagttcacaaacacacatgcatcacacacagtacacacatcacacatgaaggtgcacacacaccaccaccaccccctgccagacatcccacactacaaccaccaccaccacacaaacttttgaattctctagggcctcaacaccagcaacaagttgtttcagatggaggctgatagattttgaaatggaaatcaattagaagagtggtaagtaagacgtaagttgcagagggatccaagatgcaaataaacaaaaagaatcatcaaaacaccttaagaaaatattgcttctttacaaagtttaggaaccctatgtattaccccaaaacctgaagcctaaaagattaataaattcaactacataataatgagttctaggttacaaaacacaccacaaactgatttaaaaggcaaactacggggctgggcgcagtggctcacgcctgtaatcccagcactttgggaggctgaggtgggcagatcatgaggtcaggagatcgagaccatcctggctaacacagtgaaaccccgtctctactaaaaaatacaagaaattagccggacgtggtggcgggcacctgtagtcccagctactcaggaggctgaggcaggagaatggcgtgaacctgggaggcggagcttgcagtgagccaagatagtgccattgcactccagcccgtctcaaaaataaataaataaataaataaaggcaaactagaaaacaacttgaatctcacaagagctgatttccttaatttaaaaacgcctccaaaatcaaatatacaaagatacgcacacaaaaaaagagggctgtctacgcaagcagggattcttaagctgggaaaactggagattctaggggaattcacaggtgagtttcaggggtgacacatgaacaaaacatactgagcagagaagtcaaacacgttgccttcaaactcacccttttccccacaccttctgtaacgtggtgagatagagctcagtgctggggctgaccaccttgaaggaggtcctccaggttccccagggctgctttcccggtcagcagatcacccctggcttcccaacctctccctgggagtcacagagctactggcagcacattttctagcaacttctgctaactgagcacataatactattttcttttttttttgagacagtctcgctctgtcgccaggctggagtgcagtggcacgatctcggctcactgcaaactccgcctcccgggttcaagcaattctcctgtctcagcctcccaagtagctgggattacaagtgcatgccaccacgcccacctaatttttgtatttttaatagagacggggcttcaccatgttagccaggatggtctcaatctcctgacctcttgatccacccgcctccgcctcccaaagtgctgggattacagacgtgagccaccgcgcccggcccatactactattttcaaagaagcatcgattttgcaagcagcaaatgaaaacaatgacttaccccaacaaactccccagcgtgcagagctcaatttacaaagggaagccggtggcaagacgcttgtaactgggtagtccagacaagccttgttagtgttgcaccaaagacactgaaagagaccaacattaagcaagcattagaaacaacagaaaaaccaaagaactgtccaggctctgcccacagcccgccagtgctgccatcgctctgtggatggctgtaaaggctcaacctccccctcaacgcctcatctctgccttcaccctcagcgcccttcggtccacacccagcacagcggccagcagccctgtcagctctccacggactcatccaaggcccgcgtcactcaggcctcttccacaactcaccctgctgaggccacggggcctctgtgttggcagcctcctgagtgctgccaaccccacctcatgctctcagcctcagctcagcctgccggttctgcctggagcactctccccacatctgtgtggctccccactgactggatgggccctgcctcgatcaacagactggacacaaccagccgcctccaccccctcctcctcacctcctgtgaggtttgcttccgtagacctctcctccccacacgccgggcacctgtgcacttcactggctgaagtctcccaagaacacaggacacagcctggcccatcacaggcactcactgagtttgtgttgaatggacttgggtgagcatggtcaccatctgtagcaaggaccatgcttcctacctctgaccttcacaactgcactaagtcgcacagcttgaaagatgatgcaactacggctcagcccgccctaaactgacagctggagagaacctcatagacgctcttgtctgagccccttgaacgtcaggtgtgaggccgcagtggtgtggagacaacaccatcacacccgtgtgtgtgtgtgtaagagcccagagctgggcccagcccatgccacagcagtacacaacgaggcccgaaagcggtctgtgagccaggcactgagcgtgacaggggacagcctagcacgcaggcagatggcacaggaaggggtgaaagaactgctgttcgggtcaggcacggtggctcacgcctgtaatcccagcactttgggaggccaggagggcggatcacctgaggtcagaagttcgggatcagcctgaccaacatggagaaaccccatctttgttaaaaatacaaaataagccgggcgtggtggcacatgcctgtaatcccagctactccagaggctgaggcaggagaatcgcttgagcccaggaggcgcaggttgcggtgagccgagatcgcaccattgcactccagcctgggcaacaagagtgaaactccgtctcaaaaggaaaaaaaaaagaactgccgttcggcagcacctcatgcgccagcccaagtccagacccaagtccagactgcctgttactcccaatctccacattaacagtgttactgactttttaataggatagaaagtcatggcgtttttggcccaggttagggcaaaagtctattacaaaaaaatattaattacaatgtcccctgggccttctttcccagggctacttatacagtgaccaccttagtgtcgtgtttaagtggtttccagcataatgtaacaattaacagttaaaccctgtttattctggtcatttgggagtatcttccatttcaggggttttgcttgcaattaacgatttttggctaatcctcccttttcaagtggctcaagttgtaaatgtctgattttccatttttccatgacagtggtaccatgagccacaggactgcactgggaggatacggtgttctctggtggttgtgctgcttttctgatcgatgaagtaatatgcacatagcaagcagctcaggcagcagcacagacacacagcccgccacggcctcggcaacacagagacacacagcccgccacggcctcagcagcacagagacacagcccaccacggcctcagcagcagagacacagcccaccacggcctcagcagcagagacacagcccaccacggcctcagcagcagagacacagcccaccacggcctcagcagcagagacacagcccgccacggcctcggcaacacagagacacacagcccgccacggcctcaggagcgtggacacagcccaccatagccactgctccaacacgcaggtcctcttgagacctcccaggcactgacacctccttccagaaacctcctgtgtgcccaagagcacacccacacacgcctggagctactgtagggcaagcggccctcttcaccgccctgtctgggttcagaactggagtcaggccttcagcccttctggactggccccatccacaatgacctgggcaagtccctcagccgcctcatccacgagatggctgtcatcaccacaccctgcccagggtggtgagggttacacagggtactatggcaaaaacgcactctaggctacaaagccacatacaatagtgagctatgtttaaagctgaaatgacttccaatagaaaaatccagagactaaaaagaagcaccatctagaaaatgcaccaggaccaggcgcattagagcaggttcaacatcaccaatgtcaagatctgaaaccacagaaacagcgtctttcaatttttaatcagcaaatgcaagtatccacttaagtcccacaaactgacagggtgtgtctcgaacctacgctacggtctcgtggaggaagaagagtttttaagaacatggctcatgccttagaatagaaatcatcgaatacatctttcccggcctcctcaaacctacgctacggtctcgtggaggaagaagagtttttaagaacatggctcatgccttagaatagaaatcatcgaatacatctttcccggcctcctcatatcatgaaacctcattgccggggaaaggaagcctctggccctgcagttctcaaaacctggtaaactcctgactggaaggggcaaggggtgggcgagatcaggaatcctaagaaaaaggccccacaggatgctgttttctgcctaaccacttcccgctgccgtgggccttccctcaggtttcccgtgctgatttcatagcgctgcgaggagacttgggtgctgccgaaccaagagctgcgtggcaaggcaagcccaagaggtgccagccaggctggcccaggcgcaggccaccacgcagagaaaaccaaaggaccctgttcacacgtttttgtttttgtttttgttttttaaagacagttttttgctcttgttgcccaggctagagtgcagtggcacaatcttggctcactgcaacctccgacttccggtttcaagaaattctcctgcctcagcctctcaagtagctgggattacaggcacccgccaccacgcctagctaattgttttgtatttttagtagagacggggtttcaccatgttggtcaggctggtctccaactgctgacctcgtgatccacctgcctcggcctcccaaagtgctgggattacaggcgtgagccactgcacccagccctgttcacacgtctttaacaagacctgcactgtgatgctgcttccccaccacgggtgctccttcttccaggtgggcatctgcatcagtctccatcgggaaggcaccccggggagtctcgggccccacctcatgccgtggaggcttagggaactttgctccagaccgctaccctcttgttgaaggtcacacaggtagttaaaatccaaacctgagccccaggtcacgaccagagagtgctatggacagcctggcccaccggcccagagggctggtgcctctctctccttgctgtgccccttccaatcctgtgtgagcagctgagaaagcagtctctgctgcagcccgacagcctgggaaaacacgggctcacaacctgagggtgtagctttgcggacagccaaatttctcgctatgggcctcgttaggaagactggccacgcagtgctggccccatctgcataggagtgaaatcatggatactgaccatgctcagacagtaactgcagttttcatgagaaggtttaatatacctgaaatggctaaaataacatttgataacgattccaaaaaacatccccccaaatcccaaacaacagagccctccacacatcccagcgaatccctggacctagagaaagcccgtgtgcctttggacggtctggacggcactctggtctctagtccacgtgctacttacggagacgttcttcaggcactcttcacaggttttgtttgtgttctgagaacaagctgcaggaaagaggcaagagacaagtcagtcactgagaatcaggcagtgtaaatattagtccagcagggcagggtgggcaccagtgaggggtgtggcaccaagaacctctgatgtggaattaccaaatgaaggtcctcttcctgagcccctgctgataacaagccttcttcaagacatgtggaacgagtgttcaggaaccccgctgcaggcagggcacaaagagtataaacatgcggctcctatccacaagggctcttctgggagagaagagtgccaacacagaaggctgtgtttcagatctctctgtgagaggaagtgtgccctgtggctgtgtaatcactaaccacaaacctgctgggaccttctgctcatcagcaggcactcttttgggaacccaagagcctccatccgaggccacagcaacgccagcgacactgccacgcagcacacttgtgtctttggactcacctacagatctcatgtgacaaagcaaggtcttagtcccctggtagcctcactccagactgggctatgctccctgtaccaacctgtaccaagggagaggcccggcacaccagcctgctccaaccacacagaacaccctgagactctgcccactactcaaagcgctgctactaaggaaggggtcaaactccacgcagccaacagctctggaactcaagccagtcagaagcaagagcgactgcatgagtaacttccaacatgcaaccaagctgactgcctactcccccaatcctgtaacacacacacacacacacacacagcctactcccccaatcccataacacacacacacacacgcagactgcctactcccccaatcccgtaacacacacacagactgcctactcccccaatcccataacacacacacacacacacagactgcctactccaatcccataacacacacacacacacacacacacagagactgcctactccaatcccataacacacacacacacacacacacagagtgcctactcccccaatcccataacacacacacacacacacacgcagactgcctactcccccaatcccgtaacacacacgcagactgcctactcccccaatcccgtaacacacacacagactgcctactcccccaatcccataacacacatacacacacacagactgcgtactcccccaatcccgtaacacacacacacacacacacacagactgcctactccaatcccataacacacacacacacacacacacacaaacacagtgcacgctgaaaagagctctgtgctcatcaccagtcaccagacaaaggcaaattaaaactccaaatgacagatgactacacacctaccagaatggctaaaattaaagagaatgacaataccaaatgttggcaaggatgtacagcaacagaactctcacacagtgttggtggaagtgtaaatggctcaaccatttgcaaagaaggtctggcagctgctcctaaacaaacatgcgaccacctatgactcagcaattccactcttagtatttcatccaggagagaaggcgcctgcatccacagatggacctgcgcaggaaggctccgtgacagccccaagctgaacacagcccagatgtcactctgtaggagggtggacagacagactggaacactcacacgataccagcagggcatcaagaatagcaaacatgcggctctcgtatcaagggatcttctggaaaaggcattccaaacacaaaaggctgttttacgtgtctctcctttggaggtgagctaggcggctgtgcaatcactaacactgttcagcgataaaaagaaacgaactgctctatgtaaaacatggatgagtctgaagcacatcatgtgagcgaaagacgccttccacaaaagaccctaccgtgtaatttcgtggctatgccgctctagaaaaggtgagactcacgtatggagggaggggggcaatggctgcctgggggacggccatgcgtgggggaggctgaatcttccagatcgagggtctgtctcggtcgcggctatgtgggtgtaactcactgaacagcacaattaagtttcccacatattcccgtaagaaaaatgtatctcaaaagaaaaaacaagacaactgctgaactctggtccctgacaggcatggtgaaggcaggagagcacgctcatgtctgtgactgatgctcacgtctgtgactgacattcacgcaggcgtggaaggctgtgggggacacctggacaaatgcaacacagcaaagcatggcgacacggctgaagtggcgggtatacaagcgcgcaccacaaaatcctgcagctttgctgtccatgtgaagagcttcatgatgaaatggagggaaaagagcttcagctttaacttacaatttcactcattacgtttaccaaaagggacaaataatacatcgagtacattgttgtgatccttctatttaacagtgtagttctacactccacttttctgaataaatctccactttatttgaaacgaaagcacattttgtcacatattctatagcaattatcactaagtagtacttttctcagagtctctagcgatgtgctattcggtttatggagaagtttcttttaagccactttagatacttgaaacaacaggctgtattcagccccagggaggcaaagaaaattgacaaccagtgaaaagccttaatttcttaaatcactgctgagagacagggttacaggaaactttgataagaacagcactgctgacgttcccaagtccccagctacttggcactgtgggaggaaggagcaactgtgggctgatggtgggcaaagacccccgtggtgctgcaatgtgacgggcaccatgatgaactcttggttttaaaattcaactcctagctctgtctgctgaaagggcctagaaaggacaacacccagcagcagaggtgtattcttggtgcccaggtcgtggtttctacgtgctgttccccatcagccggaagcagggctcctcggagaaatggctgattccagaagtggggcaggaagtgaacacatgagccacagacagtgtgcagtgcccgagagtggcacagacatgaacgaatggcaagaggacccagaagccagcctggagggagtctttctggccatatctgggccaagtgaacatcaaaataaatgataacagtcatgaactctaacccctagaagccacactgacatgaaataaagagaaggccgagtggcaaatgctgaagaaatgatgagttgagaagcctccattttacaatcatcacagccaacactaatgcaggcaagaattccccaaagatgccaagtccactgggtctgcccccgaagatgccaagtccactgggtctgcccccgaagatgccaagaccactgagtctgcctgtggactgacaagatagtctcaaagcacctccccacaggtgagtcattactcatggagaggaggtggcacttccaagagatcagttatctccaccataacccagaacaacatgatgatgggacaaagtgacagcatgtgcctcccacggaggatactgagaggacagaatcactgtgccgtgctcctgccaaagcgcacctgaatcgaatcaaaggaaacacccggtaagacccactgagggtccttccacaaattggctttctcaagacaaagaggaactattctagatcaatggagattaaagagacacaacaattaaattcaacttgtgatcctggatttcagggggtaggggaacaggacattgttggggtaactgtttaaatttgtatatggattgtaagttaaatcaggtattcaatgttacatgtccagattttgataattatataaatttcagttatgaagaagaacagcctccttcttaggagatagactctgaagaatgtagagataaagggtcacaatagtaacttactctcaaatggtttggtcaaaataacaacaggcaacacaattatgattgtcaatttacaatacatttttaaaatataagtagagatagagtcttgctatgtcacccaggctggtcttgaactcctggcctccggcaatcctcccacctcggcctccaaaagtgctgggattacaggtgtgagcaactgtgcccagctgaatcaatttttaaaaataaataaaacacaaacaattgtattataaatttaaaaaataaggagatctagagagtgctaaggcaaacagagccaatgttgagaatggaagggcatccaggacttcactgcactattccttcaactttctgcgcctctgaggtctttctaaatacaatctgggcaaggagacagggtatgcccaacacacccactcgagtccttcctgaaaagtcatccatgaggaagggtgcgtgtgcttcctctcctcagcccaacagtggctacaagtgacaggggattttcatttttaaagcttctttctgataactaggtcttgtgtgaactaaaagaactgagctccaaaacacacaccgtcaactccatctatccccagacctctggattaccggtcagtctgagtcagacccagacctctggattaccggtcagtctgagtcagcggagaggcatgagaggaagagggagagaaaaaccgcccaacattcctcctgctcccagcaggccaagaacagagcgggctttcaataagggggaaaacaccaatgtttacagtcctcatgaaaataacatcaaagatgaaaaaaggtcattctattctatcctttgaaaacatatcatcttgcatagtaagaaaagaaaggccgggtgcagtggctcacgcctgtaatcccaaaactttgggaggccgaggtgggcagatcacctgaggtcaggagttcgagaccggcctggccgacatggagaaaccccatttctactaaaaatacgaaaattagccgggtgtgatagcatgcgcctgtaatccctgaggcaggagaatcacttgaacctgggaggcggaggttgcagtgacctgacatcacgccactgcactccagcctgggcaacagggcaagactccatctcaaaaaaaaaaaaaaaaaaaaaaagaaaggcatgaatcatttgttactgcttcaaagacaagcagtgtttatttctctaagtgatcactatctcttatctcatcacaagatacagaaaaaacatgtgctagaaaaccagagataaaaactgcccttgtgttgcttaagtctaacactgaatgtgactgccctgacttctgggtcctatgactgcaaggcttcaacttagactccatttatcaatttttaaagacctttcagtctcatttgtttccgaaattaaaggaaaaaacaacaacaacaaataacgttttcttctgtcaggatacaccaaccctccatgacccatttgagtgctttcctgaagtttcaggtgagtcaataaacacactaaggacaaaggaacacaccagcaagtgtacgtatttccttgtcatgctcctgtcacaccgcaggccacaggctgcagtctccatgctcatcagcagaacgagcagccaaacgggcatggtgcccactctgcactgtgacagaggcatggagaacaactacattgtcaattccaggtgagaaaagagggcagatatggagacaaaaaaatgttcttggaaactccactatttcaaaagaaagagttgaagactaggagtatgtatcaacactgtgaaccctatgtacactgtagcactctgtacagttagaaagccacgtttctcagggtgacaggggcagaactccacatcaggagtccccactgtaaggagcagctgagtgggacccaccacctcggggacctgcactggccaccactgcgccagccctcacacagcagtctgagctcctttttggggtcgtctttcctccagatgaagctcttggattgagtctgaccccatacacaaataaagtggggtccaaaagccctatccaggtttaacttcaagaatcttgctctaaagatcttcaatacaccatgggttcttaatgtctctcctccatcaaaacacataaaaagatgcttaaaagtgttggatttggattggtataatgtattctctaaattcacacagtgtccttgtaaaggagacaaaacgttttaaacatcagtactgcggtcacattcctgtaaccatgacaagcagtaaaaatctcacaccaagcaagtactctgtgggaagaggggagttctccaggctataaatagcccctctctccaaggacaaggggcacgcagacaccaaaggcgcctgggcagtgaatgccaacatgacacggcaccattcttcctattccaaggggtccccagtgagagaaacaacagtccacccaccaggacttggtgattaccataagtggaagcaagcaagtgcagcctccaagtgcagacacaccgaatggcttttcagctgacacaccgaatggcagttccggattaattcccacactgtccactccactcgtccacacccatctctgcacccttcagcagtgcagagcaggaggaatcacagtcaaacaaaacctcatggttgttttcctgacactcccgctttcacaatgcaagcaaacacacccccgagccactgatacagttgccagtgaatcacacactctgcctgcagacgcccattctgtttgtggaaacgtattcactgcacatttgcgcttagaactcaatctgggccaaaagttcccagtacagtcccactggcctccttgactaacaaacttcaaggcagctgcattgctaacgtcacaaaccctaagcacacttggaggcaggtaagaagaaacacaaataatcctgcatcggaataaacattccataaggtcacaaaaagaaaaggtgctctactatgctaaacagacactgacagagcctgggctaacaagagctgagaaaagtattagcccctcaagctgggcccaggtcaaccctaattgtaagggtcaggaaactgaagttaaggtggcactattccccaccactagtggtcacctggaaactccacacacggaagccagcatgacattgtgaaacaggtccaaccatgacactctccagcttagaacctgctggattttcccgcagcccaccaggccctggaggcccagccccacaggaagccaccctctataaacactgccggtttctggaactctgagtctcctgtcatgcactttcctcccccagcccccgcgccctcactgcttctttcttggtcagcctcccggggactcagctcctcttggataggagctctggctgtcggtcaccactgtggccgcagggcctggtgcagacgggataaacgatgaagaatgccacctgcgcgtctggacagcgtagaaccgcaatcagcttgcttcaaaatcagatgctacagcctggctttggggacgccttcctttctaaggcataagtgcgagcgttcgctgctgtgcgtggaactgcggccgggagggagtggcggcgtgaacgccggcggctgtagagacacaccggccgcggccccatcaccctgcaggggcctgcggccgccatcccggcctgcccccgaccagctgtgcgacctcgaacacgtcgtgagccggcttcccggctcgggatcgaacccgaggagtgctgtttggggtcgcagtgaggctaagggaggccgcaggtgccaagcgtcccgcctgccgggcgagggccaacccgaggccacgcgcgaggagcggccgcagcgactggacaaaacaaagacaaagacaaagacggctcttcccctgcccgcgccccagccgcgacggcagctcccgcggccgccaaacgggcgtgaccctcgaggagcctccgtcggggcgctgcctgcgaccgtgggcccaggccgcccgccgagcccagcgccctggccgaaaccccgaccccgaccccgacctggacccaccagccgccccgcccccttcgcggccccgcccgccccggcgccctcaccagctccgggaggctcctgcgcggcggccaccgggatgagcagcaggagcagcgcggcgccaccgaggcgcaacctccagtacggcgtcggcccgcgggccactccgggcgccatggtcggccggtcgctctatcagtcagtggagcgttacaactccgactccagcacaagcggtctccgcccggaacagccgcggcgccggaagtggacctgcgaggtggggccatgcgagtgcgcagcctcaaaaagcagctcgccccgctccctcgccatctgccccgcccctcgccaacgggctcgcctcccggcgcggctgaggttcagtgcgcctgcgcgatagaggaaaggagcctggtagcgaggagagcggctgaggctcagtgcgcctgcgcggcgcggatgggcgaggcgtgaccgaggggcgaggcgtgaccgaggggcgaggcgtgaccgaggggcgaggcgtgaccgaggggcgaggcgtgaccgaggggcgaggcgtgaccgaggggctcgccgcggctcctgcgcctgcgcggcggggaacggcgaccggctgaggggactaggggagcgcggtgcttcggtggcggaggtcacggtggcctccatcctaaagggctgcgggcgtcccggacggcggtcccaagcgctgctcacgctgctcttaagtgagccctggacgaggcgcggtgggccctcatagtccgcgccggcgccctcgctccacaccgcggcgtccggccctgggctcccgccgatgtccgcgtgggacttttaggggatttgtttatttttgtacgttaaccacactagaaacggccccagaatgggctgaaacgtgtgctgctgaagctgccacctaaactcccgagagaagcgccgtttctcctccatggcttctcgccgacgccctcgctgcggccttccgggcccctcggttgataaaaggactaaatagtgacggacatttttaaggctacttaagaaatggcaaaaatacatttagaggtgtgaacccgaacacactgcgcgctttaagccccgcgagagccggggccgcccgcttctgtgcgcccgtagctcctttctcgggtccgggattcgccggtgccggggacagaaacctcctgccttcttagttcatgacccttgtagatgaacttccctgttttctgcactgcttagaccagaagacgggaaaccgtgactgccgcacccttccctgaagcaggcactgcccgtcgtccatcaaacgcgaggactgcgcccacctcgtaggaaggacgccgcggtcctgctaaaagcctccgcctctgcctgcccgagggcacccttcccctccccgcttccgagggcggactccattcctctggagccggtgtttccgggtgggccagcctccaactgcctttgaataacccccccttacattagattctgaccctgtggtgattttaggttgggatttgggcgcctgcagatggctccgaagccagcctcttgtgatccgagccacttctctggcactcggagcgctggcacccgcggagcggccttggttcaccggaccgcctgggaacctggccggggtctctggcagcctcccagggctgaggttcagactctgttccgcctacccaggtccacacctgatagggctggagttgaggcttggttttaaggcaagagtttcgtttgttatttctccaaagagtcagctgtttgcaggtgtgtggttaacactatccttcgaggttaaggttttgttcgtcttgctaaagtttgcaaccttttttgtccttcagatttggagaaggggaaagcagtttctctttgaaaagaagcagcgaatcgtggcttaagcaaaatttgtaatccttaaaactggccaggctctggagctgagttcaatttgacatgtctaaactttcttcttgagtaaccagattttcccttacagtcttttgtcacttaagagaactcataggcaatcgtccatccaaaacaagtctttctccttcagggaggacccatctttggaaactccagctggtttcctgtgcagtgcttatggtgccacctctcgttatatttagaaaaatggtctcacgtaacttgagaaaaaacatttcagtgaccaaagccgggtaccattggaacaccaaggtaatttacttgtttgctcaattggaaaacgctggctctaggataaaacggaatctttgggagagttattttttatggtagttggaagcatccaaaagaagttctaataaaggtatttatgagagaaaaacaaaaattatctaaaataatttctgaatttaaaaaagactactgaaatttctccccctcctccctcagctccttctctttatcctttgttgtctgaattacctcgcccagacccacctttcttcctcctcctcctcctgttttggggccattgctcaaacagccagtgtctctcataggggacaactatgtgccctagttcatgagttatggtcaaaggtagaacttaaaagtataatcaaggaatttcctgatgctcaccaggaccccactggttttcccagagaatttaaatacccgagtgtgtgaccctgcctctactttgggaaaaataatttttttttttttgagacggagtctcgctctgttgcgcaggctggagtgcaatggctcaatcttggctcactgcaacctccgcctcccaggttcaagcgactcctctgcctcagcctcccgagcagctgagaccacaggcacgcaccaccacgcccggctaatttttgtatttttagtagaaatggggtttcaccatattggccaggttggtcttgaactcctgaccttgtgatccacctgcctcagcctcccaaagtgctgggattacaggcgtgagccaccacgcctggccataaaaattatttaaaatagttaacacgagttcccattgctgacataagcttttgctgatagagcagccgtgttttctgtaataaatcccatcttgttacaaggttccattccttggagtcaaaaaaaagttcaaagggtaggtgtcactaatacgcctgtaacggcacgtaaatctcagcctatagcttttcaactaggtcctttacaagggactcacattttccttctggttctatcagctgccagccatcttataaaaggagacttcttagaattacaatatccacgtttctttctcccaaagggggaagacgtatttagaattagatgagaaagctgagttactagacataaaaaaagtttcaaaatctaacccaattgcgatccctaattgccctagaagacactgaattattgaataatgaagaattacaaaacctactaaaggcagtacttgatcaaatatggtcagagtcttccactgatactggaagaatcctcttggctaccccgatcaaagtcctttagtgtagtggacttattagcacatccttcagtagttctgtgtgtgaaagtgttgatttctctttacctttacttgggaaggcagacaatacacacagacagccatgctcagggctacactgagagtccaactgatgcaaagacagttgtcttacatactgacttgttcttttttttttttttttgacggagtttcgctcttgttgtccaggctggagtgcaatggcgctacctcggctcactgcaacctctgcctcccgggttcaagcaattctcccacctcagtctcccgagtagctgagattacaggcatgcgccaccatgcctggctaatttcgtatttttagtagagatggagtttctccatgttggtcaggctggtctcaaactctgaaccccaggtgatccgcccactgcaacctcccagagtgttggaattacaggcgcgaggcactgggcccagtcttttgacttgttcttaaaaaaaattttttattacaatacatgggcagtttactcctttgctcagaagataagcaaagcttttatagaagatgggatacattcattacaacagccctaaagggacataaaattcctaaagaaaaacctcaattttataaaaaacaaagtacttgggccacttaatatctaaagaaagactttctactaatctagatagactgaaaggaattttagctttccaccaccaacaaccaagaaacaaaaggatgtggaggactggcaggatattatagaaattggatcccaaacttttctttaaagctcagtccttatacgctctctaaaaacaggacatgccaggactttagagtggtcagaagaaaatacaccaacatttgaaatgatcaaacgtgaccttgctaatgctccgcctttggggcatacaaattataaccttccattctattatttgtataatacatgaaagtggtggagatgctttaggggttcctaaaacactgttatatgtaaaaattgttatttagaaacagaatgcttgttcccaagtgctgcaaagacacagcactcgaacataaatttaattctctcagcaaggccatttttactttctgcagaaggggtgctcatcacagatggaacaatggcgagagcacacctgaacaaaggagggaagccattttcatccctgccgctgtttggccctgctactgtgtcctgtctccattggctggagccagacctcacaatctaaactaaaacccgattggctaacagtttaaaacttttctaaataggtaaaagtaatggaaagacaaaggaaaagaggaagttgcttaataccaaatagggaaggggcataggctgcgagctggaatgtgcctgtgggcaggtccagcacaaatatcctggttaaggttcaaggacatagaatgtactacgtgcccgtgagcaagtgtaacagctacacaggctagagcttaacgagcagttattagcacgaagccaggaggcttgaaggaagttagtttttaaaagaaactattatttttaacacttatgatttactctttaacaagaagggaaactttgaagaggaactttttgctttctacaaacacaaagatcgaaacagacaatcattgccacagttccctaaaatataatccaggaaaaccattataaggacatttccctttacccgaggcccttgtgagttatgaccattagatgccatgctgttgccaccctcagaaacatacaaacatgttctgataacaatttacttgttttctcactgggcagaggcatttccatgcagaagagcactgccttagcagtgagtaaaattgctgtagaaaaaggtattgcaacctggggagttcctctggaacttgtagcaatagaggaactcacttcgctggacggatgattcaatcagtatgtaaactttggcccatcctccagcatttccattgcgcttaccacacccagtcatctgggttagtgaaatgcaccaatggaataatcaaaactcagttggcaaaattaaccaaggcttttcaaattccttggtcagaagttcttctactggttctgcttaatcagaggtcgacccctttaggtaaacaccagttatctctgctaaaaattaggcagacccatgaaattatctccaagaaactgtacgtctatgatattaaagggagacatattcagctattgcagtgcccttgcaaaacattaatgaaaaattataattggcaaaaataatcttttcacagtgagctcctgggaaacaaaaatttcaaggaccacagacttcaaccaggagattttgtctattggaaatgacattttttaaaaagtctctgcaacctgctatggaccttatcaggtactcctgaccagccttcaccataaaattagaagacgacccttgaattcacatctcccatctaaagaaatctgagcctcggctgggcgcggtggctcactcctataatcccaccactttgggaagccaaggcaggtggatcacctgagatcaggagttcgagaccagcctggccaacacggtgaaatcccatctctactaaaaatataaaaattagccaggcatggtggcgcacctgtaatcccagctactcaggtggctgaggcaggagaattgcttgaacccgggaggcagaggttgcaatgagccgagattgtgccactgccctccagccttggtgacagagtgagattccatctcaaaaacaaagaaaactgagcctccgaaatgggctcttgtaccagaaggtgataccctgggacagctgggacagtgttctttgggttatgccggtcacaaggtcaaatatttcataccgtttcacactcaccaatcttcctcatctacagtcttgtcagattcatcctgtattccattggtatcatcatttagcttctgtctttctgccataactgggtattgaaggcgttacttgacacgtagaggccctcaccagttacacacaaaaggccttaagatatagccaggtatctcatgattaaatgataaacttacctgagaaaatctgtattataaaaccatatggctttagacatactcaccgcagctcgagggtaacctgtgctatcgtaaaactaaaagctgtgtctgtatcccagataaaccaaataacatcactaaattcatggctgatgtgaaatccacataaaccaacctttcagagccaaaacctcctccaaacaactggctaaatagctggttgggatcttggcaaaattagtgacaaaaactgttaacttattctagaaattacaatcattttttacgtttgtcctgtttgctcaggctcagcataaagggataaagtggatgcaaagggaccttagtgacagcaaactgtgtctctgacccacgtcttccagttcaaatactttacatcttcattgggatcttcgattgtatcaaaagatgtttaaaaagccatttgcaggccaggcacagtggctcatgcttgtaatcccaacagtgggaggccaaggcaggtgtatcacttgaggtcaggagaccagcatggccaacatggtgaaaccctgtctctagtaaaaatccaaaaattagccgggtatggtggcacacacctgtagtctcagctacttggaggccaaggcaggagaatctcttgaacccaggagacagaggttgcagtgagctgagatcgcaccactgcactccagcctgggccacggagtgagactacatctgaaaaaaaaaaaaaatcagtttgcagaaacagaataaacacaagtctagtttagaactatgcccctgaaacaatacaaccacacaatgctaatttaatggtatttgatggacattaggtgtttgtaaacattaaccaaaactcggtgaatatcaccacattttaaacaatgcacaatggcattttaaaatataactaagttctgggacaacttaacaatgcagaagttcaaaaaatgcatggtataaccccagttcctgttttaaccgcatggaagtcaagatttaaaaagaggaaatgggaggcattgtgtaatttaacatgtctggaatccaaagatacatattcaattgtcaaagagcttcaagctcagaggaatgacccaaacggcacattgtacaggaagtacaaccgttatgactctttacagaaacaggatgattacttagagcagtctggaattaaaagtgcatatgtctttccatgaagaaagatggttagggaattaaactgatacagtcacaatggtatcaacttaggagaaatgacagccgagccccagagcaatggaaagggctgtccacaggaccagacagccacagtgggctggggccagagaggggaagttccagggtccccacctagttgtgcatattggagtcacctgccagggatttccaccagcgggtttatttggtggttaagtgtctgtgcagttggattttttttgtatgtggtcattatgagtacattccttagtgggtgacttccagagaggctgcataaaaagagtgaagcttctggcaacccattaaaccaccagatgcttaacactggggagaacaaggagagcacctgaaggtcccagactttggactcactttggaaggggctagacagtgtggagccttggacaggcagggatcagcagggtctggggtgaggcatggagggagggagagagggctgggcccacaggccacagcccatttcccatgatgggactaagcagcggtgtggaacctgcacccctggtatgtgggaggactcctgtggggctgcacacggttggcagcttcatggcttcagagctggtctgtgccacgcgagatctcttgtgctcaggagtttgtccttgaccaaggcacagagagttccggttgcccatcccttgcaagcagttatgattctcaaagcacttcctgtgccagcctctctgcatcctcccagggccaagctttagtgatccctccacctatacttttgacaagacaaaacacagcttgttccaggtcaggcagccagtaagaagtagagctggacgtggactgggggggctcatccttggagtccgtgcttcttccccatgtctcaggagctcccctcatttctctggaacaaggttggaacgtcaaaaagaccttctgaaaactggcaggaaaatgtcagaaaaatcacaaaatggattgagggcatctgacagtttgtcttgctagaggcacgtctgggggtgatccaggcccttgctgcaatcactgagatggatctcgagcaggggcacgtgtcctaggaccctggctcagggcctattgcccactgcatggtgatataccagcacactgaaagagagggagttgccacagagaaagtccaagacgcgtgggcagccaagcgaggagatgggaggaaacctcaaacccacctcccgaggggcttggggatggtgtttttcaggggtctgggcaggtgatggggtctgaggcgtggggatcgctgattggtgagtatgagtggtgaagtcacgggataggggatgaagaaaccacattcctgagctgagtcggttccttggtggggccttcagaccagttggcgtcagctgttctgctggaattcagggtgtgggaaacaccttaagcaattcttggcttaaaaggtccaggctcagagattccacctgtaggaacaacggggagcaggtgatccgtgtgcctcgtgactcttgttaagttagcagctgcagtgagttgggtggtggtgcctgccacaccctggtcagtgcctaactccaattctgcccaaagcctgcgttggaattctcagtaaccctgtgaggagggtttcactcagggctggcatctgatctttgccggacgtgctccaggccaggccctctgattgcctgggtcacctgaggtcaccctcccccatccctccttcctgagagggcatcaccaccccgcacacacccctgtagaccataccttgatgtcaatttttttttttgagatggaatctagctttgttgccaggctggagtgcagtggcgcaatctcggctcaccacaacttccgcctcctgggttcaagccattctcctgcctcagcctcctgagtagctgggattataggcacgtgccgccacaccaagctaatttttgtatttttagtagagatggggtttcaccatgttggccagggtggtctcgatctcctgaccttgtgatctgcccacctcggcctgcctcccaaagtgctgggattacaggcgtgagccactgcgcccagccagtgtcgacaatttgacctccatctcctagctttgtctagtggttctcaaactacagcgtgcatcagtatccctggaggacctgcaaagcccagattgctgagcccacccggagtgctgccgactagctggtccagggccaagccaagaatgcgcctctgacaggtttctaggtgaggcttgttctgctgccaaggccagccttggggaactgaggctcaaggccagcgggtgtccaccctggctgcacagcagcctccccgaggaacactgaacaccagtcacggcagcccttctccgacagggcaggggcttttaaagccccaggtgcaggctgagtggggacccctgagctgggaagtgagcggtgttggagcatctggccatttctagctcctcccacctgcccaggtaaagtctcccaggcatatacagtaagaggttatcacacagttagaagttcgtttttggtttgtttgtttgtttgctttttttttttttttttttttttaagatagggtctttctctgtcaccctggctggagtgcagtggtgcaatcacagctcactgcaacccccaactcccaggcctaagccgtcctcctaactcagcctcccaagtagctgggactacaggcatgtgccaccacactactaattttttttaatgtttagtagagatggagtctcactgttcaaggctgggtcgccaggtgtgctgtgtgactcttgttaagttaacagctgctaacttaacagcctcaggttcaaggccgatctcgaactgctaaactcaaccaatcctcccaccttggcctcccaacgtgctgggattacaggcgtgaaccaccgtgcctggccacagttacaattttaaagtaggggacctaaagcagatgccacccacatgtgcccatttgcaggtctgcagtggccctggcagtgtggccagctgtgtgacttgcccagacaaactaaggggtttcccaggacaaaggccttcctgtgctagaactgagacgttcaccaactgcaaccacggccagcagcctgcttgtgtccagagctctcaggcaggatctgtgtggagcttggtgctgaattctgctctggggccgtgagcagctttggcacagcccagggctgtttccacacgtccactaaagcagtactggctccctcccctctgagtaccccagtgggaggcagagggggctctgtagacagccagaggggaggtgtagacacagttggaggagaggtatagacagctgggggggagatgtagatagctggagggaaggagtagatggctgaagggaaggcatagacacagctggaggggaagtgtaggcacagccagaggggaggtgtagatggctagaggggaggtgtagatggctggaagggaggtgtagacggctggagaggaggtgtagacagctggaggggaggtgtagactgctggaggggaggtgtagactgctggaggggaggtgtagatggctggagaagaggtgtagatggctggaggggaggtgtagactgctggaggggaggtgtagatggctggataagaggtgtagatggctggaagggaggtgtagactgctggaggggaggtgtagatggctggagaggaggtgtagacggttggaggggaggtgtagactgctggaggggaggtgtagactgctggaggggaggtgtagatggctggagaagaggtgtagacggctggaggggaggtgtagactgctggaggggaggtgcagacggctggagaagaggtgtagacggctggaggggaggtgtagactgctggaggggaggtgcagacggctggagaagaggtgtagacggctggaggggaggtgtagactgctggaggggaggtgtagatggctggagaagaggtgtagacggctggaggggaggtgtagaatgctggaggggaggtgcagacggctggagaggaggtgtatacggctggaggggaggtgtagactgctggaggggaggtgtagatggctggagaggaggtgtagacggctggaggggaggtgtagactgctggaggggaggtgcagacggctggagaagaggtgtagacagctggaggggaggtgtagactgctggaggggaggtgtagatggctggagaagaggtgtagatggctggaggggaggtgtagactgctggaggggaggtgtagacggctggagaagaggtgtagacggctggaggggaggtgtagactgctggaggggaggtgtagatggctggaggggaggtgtagatggctggaggggaggtgtagagctggagaggaggtgtagatggctggaggggaggtgtagatggctggagggagggcagacaggtacccgctttcctgctttgcctctgccctggccaggctccgccgcaggcacctctttggtggggccaccaccgtttacggaaatgcacctaggatttgggacagggcctcagagcggggctctgtatagaccagcaggtgaggaaggaaaagggaaaacagaacctgccccatggtctgaagccagctgtgtgcctgtgtggcaaaggtcagcgggcaggacagggcccacgtgtgcctggccaccttgccagtcgggggaatacagcggacacagtgcccagtttccatggacagcctgtattgaagttttattttttttctatacacgtgattgattaacaatataattaatgggatgtcattttataccctgacaagtttaaatgtaaataaattggcaccacctttaatcagactgatgtcctgacttgcacaggaaacacgcacctaacctcaccaacctcaagccctccctcctcaagtctccatgcaaagactgtgccagtcagagtggagctgtccccccgacgagcccccagaagcacccggccggccatggctgtcattttgagggcggaaaataactggatttctggttaattggtgacatcctcaagagctgtggcaagccatgtctcggccgcgtgatggggcagacatggtgggtcctgacggccttgtcttcaccaagtgctcctaactctcagcaaacttggggttcatgaccgtcgtggtggcgctcttgaaaaggggattatcctggtgggaaatgcaaacaggggcttgtgagtgtgggaggttttcagagcagaatctttctccctgaggacactccccgcatggaagccgtcactttgaggaagagctagacgtggggcagcccccccagggtcccagcaccggcagccaagctcacccacagcggcggacgcccagaggacaagctgcctggggaggccggggtgcagccacacacgggtgtccacggcctcccgcagcaggaggtcgcatagtgtgggacgcacgtgcccctctgcgtgggacccccaaggacggccacttacattgttccactgggacttgagcttctccttctcaaagcgcctgtactcccggaggtcgctcaggtggatcagagccttccagatgaccagcaggagaatgccgatcagcacgatgcctgccacggtgcccccgacgatggcggcgatgttggggcctgccacacactctagggaagaagcagcacacctgagcgtcagtccagccccatctcactgagccgtgtgcccacaggtccgaggtcaccccacaacacagcacttagagagacggaggttcccagggccccggctcaccatccatcaccatggccaggggtcagtgagaacctggcccagcccctgctggattccaggccaggccctgtggttccaaatgaaacctaagggccattgccaccacccctgctgacagagaagaaggcagggccagggtaccgggcagccaggacagagtgctaatactggggggtaggacacagtgcgagggaccccgctctcctacagcagagttcagaaccaggctcagggtccctgctggagttcactccccatactgtgaaagtgatttgtggtcgtcaaggacaagaccagagaccagagctcagcaggtgaggccggtgccaggatgagcaacgcaaggtcctggttcccacggcagctgtgcccacctcctgagcatggggactgtgggccatagtgggccaggcccacagctgctgaccctgggacagacactagcgttcagtgcagtccctggcctggtctggcatcctcactccctgtacccctcctgccatcctgacctgcaccctcactccctgtggttgctcctgccatcctgatctgcaccctcactccctgtgccccctcctgccatcctgacctgcactctcactccccgtgccccctcctgccatcctgcctttcctgggggacctgccttccttcacctgtcctcaaaggtgaagtgacttggccaggattgcacaaaccagacgtgacccaagtctgtccctcaaagtggcccgcaggggttcctgccctggcaggtgggggtctgcagccccaggcccacatgtgggttgtgagctccaggcatgtcacctacaggctcagagacccccgccgcctgcctcgggtcccttcctggtgagggaggagctcccaggtctcagttctgcaagagtcctggccggctgctggccatgcctgatggagtccgccagcggccccccagccccagcccctctgcctctcaggagcctgtggaacatgagacctgaagaagcagggccagtgtcaccaaggtcaccgtggggctgggcctggttccaactggagctgaatgagacagggtcagtgccaccaaggtcactgtggggctgggactggttccgactggagccgaatgagacagggtcagtgccaccaaggtcactgtggggctgggactggttccgactggactggagccgaacgagtgatggggacggtggtgcctggtggccctgggcccctccagggctgagagccgagcaccaggatctcccaatcccctcaaaggagcctcacgcagcaacctgaccgcgggccacccctggggacctgcaactgcaagccttgccccatgaggcatccagcgggagatggcccgggccgtgtggcatgctggtgggcctgcccggtgtggagcagtggtgcccccagggagcaggccgtctgctgcccagcttgatgtggggtcaggtgaggaggggagggaaaggggaggctgctgggggtgaggggaccggcctctggcctccttgcaatgccaagggcatcccgcatggctcatccaccctgctgggcccacaacactggaggtgagatcctccttccgcaccaccctcgcctctgcggagaccccgcagccggagctctggagccggtccccgctgcaccccagcggcctcacctcggctctcatccacatagatgaggtagcggtccatcccgtcctgctgctccagcgtgtaggccacccagcagccctctgagtccctctccttgcaggtcctgcccttcacggggttgttcgacagctgcaggcccggacacgccgcgctgcagttcttcccaaaggggcccttttcgaacttcaggcactcggcgcaggagctgcggggagccaggtgtgagcatcggtgccagggtgtgcgggggctccggcaacgggggctcgggcttgggtgtgtgtccaccagggggggcaggtggggttggggcgccctcaggccaaggagggggcccaagtggggcagatgcgggtgcagcgggtgaactggaagcctgatcccagggcccgcggcaggtgcgcacaggagggaggagggacacaggggcacggcggccgcggagggcccctcagtccagacgcacccgcagagaaccccgcggtgcagaggtgctcactggggtccccgagtgagcccggctgctgggtaggtggccggggagtggggatccctgcccgccctgcctgctccgcctgcactcacatgtacttgccacagggtgaggggcagccggggcactcctggcacagaggcagctggtagcctgaatggcactcgcatacgttgcagcggcaccggccacgaccactacactcaacacgccgcgggttcaggcagccctcagtggtcctctcgcactggcacgctgagccctcaaagcccgggtggcagcggcacttcccgcagaagcagagccccctccctggaagacggggcagcacggctaagctcctgcttggcctgggaaccgagacccgcccgaaaccccactgcggttgctccctccggcccgcctgcctcctccagcctgggggatgttcctgagcaaaaggcatggggccactagccaggcccttctgcccccgccagccacgtggccgcctcctggccagtctggacctcccctgccctgctgtgaatgggacctcaatagggctatgaccgttcctcctgtgggccctccccacaaggacgccttgtcctcatggacacagaaactgaggcagggcggggtgcagggccatccaagttcctgctgacgcccggtggctgggcgagacttgcactgtctgtcctcaggatcccccctttctgttccactcgttgaatggtccagaacgcaccccccaacaccaagtctgtgccgcaggacggccgttgtccagcagggacccacgggctcacccgggccgccgcagacctggccgttgtagcgctcacagttgatggtgtcacactcgcagtactgcccgtatatcagcttgccggggacgtcgctggtgtggcacaggcactgcccgcagacacagtcccccagccctgagcagatgatggagttgttgtccttccggcagcttccttccagctcctggctgctccggccctgtgtctggcactcacagtttttcccaatgtagccagtgtcacacctggggacaggaggggccccaaggtcaggctccccccagtgatgtgggacaagggacagccgccctgtcctccaggccccttgcccttggtggagaacacccctatggcacattttgctttcctcgaggcctactgagcacttgccacggactaaatgtgctcaaaacgtgcaggggccccgcgttccctccccaggatgtcccgaggggaaagcagacacctggccttggcctgcgcatgcagtggctcggcaggctcactgtggagctgtgttgcagccatgcacatggcctgtgctgcgataccggtgctctgtgagtggctggtgtctgctcctgcgtgccccacatggtggccagtggggactcggcactgcctcctgccacagccccgccctccctcctgcgttcgtgcactgacaggccaggttgtgggagaatgcagggacaaggggtttttacagatgtggaagctggcatcaagccgctggcaggcaggagccacacacaccctgaggcatcctcagagacggcactgccacgggctctcctgctccccagaggaggaagctgcaggaccgagtgtctgagtacctgtggcagggcaccccccgacacctgccaagtgttccgactgagtcacccctacagtcccgtgaagaggccgccccagggctgcacacccaggacagtgggcggggtggccactgaggcacgaggacagcaacagagaccaccaagaccacagagaccatcattgtcctgagatatgggaggaggctgggggcagcagggacctgaaggtgaggaagggcactgccaccaggacgtggattggcactgcggtcaggacaggggaggaggtgaccagagcaaagggggcagagtcctgggaggtcagcctagcagctctggccaggcaagcaaggaaagggggacagccatccagcccccgggcaggccgcctggctgagtgccatgtgaacctccccactgggtccacctgtcccccacttctccctgaggtggggtgcccacgcctggcagggggtgtgcacgcccaagaggtggcctatggggcccaggctcccagaagccatcacctgtcccaggaggctctctagccacccatgccccagggctgccagcctgatggccttgggtccccaaggtcagagagaagccagctcctagggtcaaggaaggtcgggcagagaaagtgacccactcaaggccatgggcacgcccagcggggactccttgtgcccctgagatgggcctccatcctctggtgagggggtcctcctgcccacaagtcccctgccttgggtcctccatggccagagagtgtagagtacaggctggcattgctggtgccctggctcaggagcacgggtgagggcttgccgaggggttctgggttccaatcccaaatctccccacctcctgcagaagggggcccccaggatgcctgctccgtggggtgggggaagggatggagccacctgcacccacctcacctgccgacacctgccctgtggggtggggctcggggatggttcaacagggacctgcgcccgcctcacctgcagatgccgcactccaagaagcccttgccatggcagaggctgcggtctctgctctggtcccggcaccggcactcacactggggaagaacctgcacggtcactatgtccgtgaagcccagcgcccggatgacaaacgactgctcctggatgcactctgtggccgtgaccttcacctggaaggtgatctgcagggcagtgctgggctcaggtggggaccctcggtggccagggtggcagcccagctcccaaccctcacctcctggcctctgcaggggtcctggggggttcagcgtggggaggaaggggtgaccaggagcaggaagagctgatgctcagatccgagagccaaagtcagccggcaaggaggtgctctgcccgcactcccgcactggccggcaccaggatctccccggccacacatcagcagagacatgtgacacgcagacagcaaatcaggagaagctgagcacactcccactcagaccacccaacatgagggaaacgttctggtgagaatccatgggacagctgggcgccgcggctcacgcctgtaatcccagcactgtgggaggccgaggcgggtagatcatctgagggcaagagtttgagaccagcctggccaacatggcgaaactctgtctctactaaaaatacaaaaattagccgagcgtggtggcacacgcctgtagtcccagctactcaggaggctgagtcaggagaatcacttggattgtagtgagccaagatcgcaccagtgcactccagcctgggcgacagagcgaaactccatctcaaaaaaaaaaaaaaaaaaaaaaatccacaggcaacatttaccaagaaacatgtttgaaggaattccaaagtcatattaagaaaatgcaatgaaagcaagtgtcttgctgaatattatttcacagctagcaaaaaaaaaaacaaaaaacaaaaaacaaaaagaaacaacaaatgattggataataaacttaaacctgaaagattagagaaggaactcagtgtccattcctaaccacctgtgtggcccatgccttaatgtttctgtcaaaaaaacagaatgaaacacgcagaaaatcatgacaactaaccctacccaggtttgccgtttgcgcctgttctgtgtgtccggcgtctgcccccagggggcgcagccatcactccatccctcagtctgcagtggcctgacccagggatttgggctccaggttgatgagtaggactcttgggggccaaggcgtgtgtgaagaaccctcccagcaccctctcactgagaagcaccctctcggcaccctctcactgacgttcctgacatcagcttcacaaggaaagcgtctggcctcggcagagaggatgtgaaggaaagaaacagggtccttccagtggatgctgcctgctcccagacagcctctgatgcctgtgtgcccctccctgcccccgtcagagtgctgggatggggaccctggctccttctggctgtccccaggacccctcagtgtgctgggatggggaccctggctccttctggctgtccccagagcccctcagcaagctgggatggggacccttgtggccaggctcaccgggacattgatctgcacgccatcacagtcacctctgggctggttcctgtgcgtcactccattgctgcagaaggagtcgtaggtgactttcagggtgtcggggagggcgttgtgatccaggaagaccctggaggagagtttctgcgggcagagagcggttactcttgggggcgagtgtttctgttgtcctggccctgcctggcccagcggtttagacccgtctccacttctcctctcagtgcaagtccccagtgtcagctaatgacacagaggagagcacagcaggatgtgctgaggatggcagggctgccagggccacagtcctgccctcgagacagcctgaccacagggactagcatggagccagggtgtgagcctcaggggtgggagcttctgctgctcctcagccttgagtccccaggacctagcacagggcaggagctgcataaattgttcaagcgataagagagatggggagaaacagagagaggcagagacagacagagatgggcagagccagagccagagacagagagatggagagaaacagagagaggcagagacagagacagacagagatggggcagagacagagagagacagacagagagagacagagaaagagagacaaagactgagagacagacggaaattgagaggaggcagagggacaggttcataggggcatcgggtgaatggccagggcagtggcgtcacctgcatcctctgtgtaaggacagaaacacctcgggcagtggctggcacccaggagggtctgctctgggggtttggggctcacgggaggctacgagaagcaaatggcacctcctccacgggccttcagtttaattcaatgacccaacgtttgtcggaggcgctaacgtgctgagctccctcaagccagcaggacctttggcctagaaggatccaggccagaattctgagaacatctctcacctgggggtagatttccagagcagtcgggacctctggtgcctggggccctgaatggcacctagtgcgcacctatgcctacctatgcccaccagggccatgggctccccaggggagcagcccagggtgcagctcgatgggccgtgcaccagggagaaattcaggggttaagggcttctctggagcttgcccaggacaggtgaacagagcaagaggaattccaccccccagggtgtcttcccagggcccaagtccactgtgggggtttcctgtggcctcctcctgccccagctgcactgtttgccaccagagctgtccacctcccttctccatagagacccgcagagaagagtctggaatgaagagtccggagctcaggtttcagggagcatcgcccacaacatcaacgagagaggacccagagctccccgtggaagtgccgggccagggtgtcctggaggcctgagggcaggtcgggaggctgcagctggcccacggggcaggggctttcctcccagaccaccctcctgctgacctgcagcaggagctgacctgcagtggggagattgctggccaccccatgggtcccagctgagtggtgcgggagactcacattgtaagcattcttaatgagatggaccacattgctggagtcctcagacagctcccccacggctgacttggggatgatctcggtgagtttctgttgggcaagaagaccagacatggcacggctaggacctgtgccacggcatctccacgcactgggctcaccccaggggcttctgcacctgcaaaatggctgggacggtcctcaacgcagttttgcacttggtccccagagtgtgtggtcagtgatgtgtggtaagaggttcttgggggtaaaaagccctgagctgcccaggggccacgcctggaataccagtactcgggaggccgatgtgggaagattgcctgagcccaggagttcaggaccagcctgggcaacataagaagaccccatctctacaaaaagtacaaatattagagtggtgtggcgtcacatgcctgtagtaccagatactcgggaggctgaggcaggaggatcacttaaacccaggaggtggaggttgcagtgagctgagatcgcaccactgcactccagcctgggcgacagagcaagaccttgtctcaaaaaaacaaaacaaaacaaaaaaaacccaggccaggcatgatggctcacgcctgtgatcccagcactttgggaggccaaagtgggtggatcactgaggtcaggagtttgagaccagcctggccaacatggtgaaaccccgtctctactaaaaatacaaaaattagctgggcgtggtggtgggcacctgtaagcccagctactcaggagactgaggcaggagaacccaggaggcggaggtcgcaatgagctgagatcacaccatggcactccagcctgggcaacaagagcaaaactctgtctcaataaaataaaatgaaatgaaatgaaatgaaatgaaatgaaataaaaaaataaataaaataaaataaaataaataaaaaataaaaaaaaaattactgttgcatcatgaggataagaaaagaaagcaaagccctgagctgcagcattgtccaggcctgcccgtgtgagtcctcctgcctgcggtgtgagtgatcccgcctgcggtgtgagtgctcccgcctgcggtgtgagtgatcccgcctgcagtgtgagtgatcctgcctgcggtgtgactgctcccgcctgtggtgtgagtactcctgcctgtggtgtgagtgatcctgcctggtggatttcaagctcgcaatatcactgggttgggaggacgtgcatggtggccagtgttggccagaatttccaccacacaggtagggaattcctaccaccacacagatggtaggcggaagtagccccacgagggtggatcacagtaaaatcaccaggaagccatcggctcttggcactctactgagtttccatgggtgttaaacagcccggtgacatcggttctggccggccagatgcacaggggcgcagccagcctcccccatgctcacacatgctcagcttctttcatggaagattgcggcatcatttcaccttccaggaacacggagcagatggtcgggtcacctccccgcccaaaccctcccatgactgccctgcatgggcccagtcccttccatggagctcctggggccggtcacagcctggccaccaccctcctctgcgccctccgcccaccgcccacttccatccgtcccagtctggggccatccctgtcttgggagagctgggccctcccacatcctgtcctgctgagcctgctgtgcgcttggtgcagaaacacactcggagggggcgtggcacgtgtgtccacactcgctgcctgttgccttgaccacccccgaaggtgaccaggaaaggctgaggaaggcttgtgtgccccaaggctcagcagtaggcatggggtgcactctacctgcctccagtgcctggccctggtgccacaccatcgcctggagtctggctgccatgacaaatggcaaaggattgggacctgctactgctggtgaggaggggaccgtcatggccacctacagatgggacacagggctgtgacatcctgaccagcaggtggtctctgtggatgtccggccccagccctgccctgcgctgacccactgtcccggcagcctgaccagctctgggtgcccactcggagggtcccccagacacctgcccccatcccgtgtctcccgcagggtcctgctcccactccagagcccggggaacctatggcaggaaccgctggtctcgctgtcggccccaacacaccacgaggttgagcttgtagctgggatacgggcctgacaatggatccctgtagttcagcaaatgttcactttacaaaagcagcggccctcccgggcactttccttccccaaaccccgagtatgtctcctcagcctaagcagcagggcaggggctgtgaggctgcccagctgggcagagccccaggcagggggaagagggggccctggtttcctgcgtgccattttgaagaagatggcggtgatggccctggaatggccagcaggtcggtcactgtccggatgaggataatcgggccctttagggcggctgctctgtgaattccctgagtgggtgagctcagtacccacgacgcactgcccgccgggcaccactacccctttcacagatgaggaaactgagggctcggggtaaggaagggcctggggcgtcctgtggtaagtaacagagctgggtgtgaggtgagccacccagggccctgtccaccctgaagaacggggcacgtggctgtgtaaagtacaatgacaactatctcgttcctccagctccaccctgaagaacggggcacgtggctgtgtaaagtacaatgacaaccacctccttcctccagctcagtccttctgtccctgtggcctcagggccacacactgtgcaggctgctatgggcggaggctcctttcaggagggcgtgcagtgtttccttccttctagcgaatccctgttacacagtcagggctccacccagcaggcctggctggccacaccccacacatgccaaagagtggtagaccccggctgagctcctgagaggtagcctctgagcccttggtacatcctacccgatgggggtgtcattgttcctggggcctcaggtcacaccggatagtcccacagtgtgatttggggtggggccctggacagttttcagcttgacctctggagggctagagactgaggtcagccatggggtgtcagccgcgccgctgtgactgacccccagtagacaccgaggctcaagagcctccttggggaccatgttctgtgcatgaggccacacatcatcgctgggaggatggagcgccgcccacacccctgcagggaggggacactgggagctggtgcctggtttctctcctgtgcacctttgacctttgctgacttttgtctgtatcctcccacctcgggcagcggctggcacccaggagggtcggctctgcaataaactgtaactgtgagtttactggttcctgagctctgcaagtccttccggcaaatcactgatcctgagaaaggtcttgggaaccccaacagcacctgagcgtcttgacgcactgacctgctcaggctgaacacatggcactagcagcggaaatgcaggatgaacgtgtttcactgggggcctctttttctaggagcagaggctggttatcagctgtgcttccttcgtgaaattcatcccactccgcactccaagcttgtgaacgtttttgtgtaattttatcttcacggagagtgttgatgttcaaatgtatgtgagcataaaataagtgtgtttccataaaataaagaattgtgttgtattccaggaaaaaacagaaatatcaccaatgccaagacatgctgttaacacagctgagtttcagggacggggaggaattcctcctcctatcgacacgcaggcgtcctgtccccgacgggaagcctcgggctcctcacctagggggatccaggacctgggccggctggttgctcacgtgcccagcatgcagaggtggcgctcagacctgcagtggcgctgggtctggcctgtggctgaaacatgcccccacccaatggatgctcgggacccaacagcactcacctcgtaggtcttcaccatcctactggtcaccgcgaagatgggctggatgttgttttcagccagcttgtgcgccagctggcccaccgatgggtagtcctggagagaggaggtcctgctcagttggccccgagtccaggacaaggcttccaggtacccgcccctgtctgccccgctcagcgtcagccctgcccgtgcttcgaaccctctctggggaaggctggagaggcagaggctgccacgcaggagtgcagggcagagagctgccacgccctctgggcaatgtgtgcatagactcgggctttcagagtccaggcatgagcagcatttgaggcgtctcaccgtgggactggggatgtccacgggggcagaatcccagccttccccacacggtggacctgctttcgcactgagggacactcagtttcggtagaggccatgagtgtcaggtgcggctctccctacccgagttccgggacccgagggccgtccctcccgtctgtggctcccggcggaggacctgagtcttgtatctctaaagtcctttgcggcccccagagcctacaacgtcaggctgcaagagcgtcgcactacggccagcgaggacaagccccttgtgaccagtggttgcctctcggcccacggctgatcccagccagaagtcctggcccctctgagccattgagatgcctccgcagagaggctcatcctaacccgtgcatcctgggctccttctcgcctctgtccctccctgcatgttcctcatggtccccgcagccgctcacccagctcaggcaatgggggcagggaggggccacactggaggaggcggactcaggggcagcagggaacgtacagtggaggccgggagggggaggaggcggatgcttggggatgggaccctggccagaggcggggacggcagggtgcagccgtagcctgggggcggttactatacctccacagcagctgtcagcccaggtaggggggcagtggggctggagaccaacagagcctgggtgtcccacaagggcgaggccgggcctcagcctggctgcccccaccaaccctaccctcccctggcctgaggccagtccggggagaccccacgctgccacttggggcttccagaagtttcctcaggaatctgctccttgggtcagaaggaggctctgtcaggtggagaccccacccttgtctcctccgtcagtggtgtcctgccaggcggtgcctgggtgcctggggtggggacttacgaattcgttgctcctcttgtacaagttgtcctccaggtgacagcggccgtcgttgggggtcaggatggcgcccagcttcccgtcgcccgcgaaatggaagccgtcatcagtggcaaacaccagcagccgcgtgacgttgcgccagccgatttcctcctgagaagaaggcgtggggggcagggttacctgcctcagtttcccagacccggccctctggagcagaggagacgatgcagagctggtggggtggcccggaggctggtgtgggtccccctttcccctgggtctcagggacccagctgtgttcccccagacgccacgcccaggaggagacaacggccctcaaacaccccgtgcacatgtgaggcgcagggagtggaggcacgtgtggaaaggcaaggagagagacacggctgcggtccctgcacttcagagctgggaacaaaccctcaggaaaccatccccaaggggaaaaaccctcgcagacgtgtgggccacacgcagaacgagtgcaacatggaggaaaacgagcctgaggggcccagcaggccttgagtccaccattgacagcccctggcaggcgcatgtgggggccgtgcgtgtcctaggctgtgacctcacactcgtgagcagtgtgtctgcgctgggactgcagggaagcaggagagctaaggtgggttgtgaggggaggacagtgcatgtggcctcaacatggcccagggactgtggctgctctgttaggctgacagtcacaaactgggtgggcgggacgtggagagcgacacacactgggcagccagcgcccacccggcctggagggaggagggtggttccaccccaggaaccacgggacctgctgcctagcggccctgttccacccttggccgctcgcaaaatgtttaggcttcataaggtttgcccagggtcacaaatttaactcacagcaaacaatgaaatcagcgcatgattttcgagccctcgtggtcaccctcccttcctcctgccctttcctgcatgggcagcagcagggtgaggagctgctctccccaggcccaggctggagtccctcagacgacctgccggccagggtacccccctgcccccacacagcgcctgacagagccccccacactgggggaacgtggggacccaagcaggggcagcggcctcaccgggcaggcggcgacctgcatcatggcgtccagcccaccctcgggtgcatccaggtttccggaaatcagctgcttcccgacctcggtctgaaactggttggagttgttggtcagcttcagcacgtgcctgaaggcaaacgggggctggcactctttctccttgttggggcatgggtttcgcagcttatcagggtgcgtgttcacgaacggcagcacggtcttgtccacgaaggacccgaagcctgcagggcacatggaggggctggggaggtggcaggctgggcccaggtgggagggccagcttcaaaggggcacgagggcaagcctgtttcctctctcctagcagggaggtggagaaagcaagatggcacatgtggagtgtgtgtgtgagcatgtgcgttgtgcaagcacacatgtgaacgtatgtgggcgtgtgtgtgaacctgggagtgtgcaatgtacatggatgagcataagtgtatgcatgtgtgttcctgcatgtatgtgtgtgaccaggtatacatgtgggcatgtgaacaggtgcgtatgtgtatctgtgtgtgcagccatctgcatgtgtaaacatgagtgtgtacatgcgtagcacaactgtgtgtgcacgtattcctgtatgcatgtgagcatgttcaggtatggacacacctagttcacgtaggtgaccaggtacatatgtgggcatgtgtgtttatgtacgatttatacatgtgagtgaagacatacatgggtgatcatgagtgtgcatgtgagcatgtctgtgtgcacatgtggtcttgcacgtgtgtatgactgtgtgtgcatgtgtgtgcacatgcaagtgtgagcatgcattcatgtgtgtgagcatgcatttgtgtgtgagcgtgcattcacgtgtgtgagcgtgcatttgtgcatgtgagcatacattcgcgtgtgtgagcatgcatttgcgtgtgagcatacattcatgtgtgagcatacattcacatgtgagagcatgcatttgtgtgtttgagcatgtgtgtgagcatacattcacgtgtgtgagcatgcattcacgtgtgtgtgcatttgagtttgggtgtgcttttgtgtgtgagcatgcattcgcgtgtgtgagcatccatttgtgcatgtgaggatacattcatgtgtgagtgtgcattcgcatgtgtgagcgtgcatttgcgtttgagcatgcatttgtgtgtgagtgtgcattgcatgtgtgaacatgcatttgtgtgtgagcgtgcattcacgtgcatgagcgtgcatttgtgtgtgagcgtgcatttgtgtgagcatgcatttgcttgtgtgtgtgtgtgttatcgtgcatgtgtgcatccccgcatgtagggaaggtggcagagtgccgatgtgagaagccacggccggcggggaagacatgcgctgtgactgacacacacgtgtgctggagacctgctctgtggcaaggcagtgctggtgtagagcggagcccttggcccagcagagcttgctgtgtggtttcttcagtgctgccgtcgctgtgccgtctatatgtgttgtggtctttaatgtttaataattggcactgtcagaattttgtcttttaaacataccaagaaataaataaaggaagtagaagatggaaggggaagtggagggctggacaatgtctacaagtgttggggagccagggactgggtgtggcccctggcagggaggcaggccgactgcagccctgtggatgccctggggggacctgcatctggggcccccagatctaccctggggacctgagtgcgaggagttgtgtgggccacaggcaggagtggccagggtctgggaaaggactgggttttgtcctgcagtgcctgggcctcaccaatgcggccggactcggtgatctcgttgagggcccggagcaggtcgccacctagcttcttgacattcctgaggtcatcaagcatggagtaggagaggtccatcagatagtacaggtcgatggggtagcccttggcccgccggaaggtcacgttgaacgctgctgcctggcctgccggtggggacagaacaaaaggagccacacctcacatctcacacagggtgtctgggggcgtgtggccccgagcgggctgtgcactggcaccctctcctccagcccccaaatcctcctgacctcccctctccccgcctggcaggagagctgaggaccagacacaggacatccaggcaggctggagtttcagaggaaggacatgactcccggacgcaggcatgtgcctcgcagtgacactgaaacccgcctggggtgcttagagttgacgccagcgacattggggacgcctttcattgagagtggcagcggctcacctgggctcacacctaacccggccccatgcctgcagtcccacgggcgccctcatcagcagccacatagacaggcatcacacgaacctggcacttcccagcaaggcccacgcgggccgtccccaggaggcccctttctccatcccagccctggacttccgctcgcccgcgtctcagtcacacgtgcggttgtgtagctgtctgtttacctgtcaccgcaaccagcctgtgtccctggctcccagaaccgtgcctggtacaagtcagctctccataaacacacatcatgttaatgaatgagcagggagggagggtgacgaagcctgtcccctctgccccaccctccagccttcagcccccctgggcggcaggacaagtgcagagcccactccacccccaacctgcctgctgccacaccctgggagaaagggtatgtgcccctcctcacagacacacacacacgcactcctacacataaatacaccacatgcacacacagtcacacatggcatacacacccacatatatgcacacacacaatactcacacacaaatataactcatgcacacacagtcacacgtagcacacacgcacccacatatacacgcacatggcacccacacacagcaaacacaccacaaatatgcacacacaccacaaacaccaaccaccacacatgcacgcatacacacacacctcacactcatacacaacaccagacacaaagcacacatactatatgtacttgttcatatacacaaacacaccacatgcacgcacacacactcgcacacacatacacacaccaaacacacacacatgcactcacgcacatacaccacacacatgcactcacatacacatgcatgccacacacatatacacatgccacacacatgcattcacacccatacacacacgtgccacacatatacacacaccccacacaatgctaaacacatacataccacacacaccatgcatacacacacaccacacacacatgcgctcacacacacacacactcacccacattcacacccggcactcctggccctggccctcgccctgctgtgccttgcagccctcagaggcttcacttggcctctgggccaaggaccccaatcactttctatgaagggccagacagtaaatgtgtttggctttgggggccgtgcggcgtctgcagcgacatggaggaggcagccaagaccatgtccccacgagcaatgtggccatgctgcagtcaaagggcacagacataggcctttggtggctgaccaaggggccccgtcccttcccttccagagtagaggctcagcgaagggccagcaggctgcgggggtagggccaggaccccgcgagaggacagtcccttcccagatcctgccgccctgctctgggagcctgtggccctggggtgctgttaagatctctccctggtgctcacccgagtttgcctaccctcacctgcatccacccgagctcacctgtgccctcccagaggccacagcatttgccccctgcacagtggggatgcatgccaggccgtgggcagccactcccccacccttccccacggcacaaggatgcccccactcaggcgcacccccaccctccaggacgatccttcctgacacctccagcaccacagagctgcacaaactctggccacaggcaacacctctgtcagcctcagtttcctcactgtgaagtggggcgtggggaaaatacatcagagctgcctccaggggccacagggccaggccctcgagtttgaggtcagaggtggaggttccagcacgaaggggcttgtgcctgctcacggggcagcgaggggcaggcctgaccctaccaccagggtggggttttgtcccctgctgcccccagggacacctgggccctgctcctgcaggacctccccaatggctcggccccatccctcactgtctcccagctgcctccctcccggctgctgctggctgtcacctggccgcctgcaccctgggccactctgccccaaggctaactcagtggccgctgacctgggcttcccctgagggcagagctctgagccccagcctgtccgacaccagctggttcctctaaagtcaccctggccccgtctgcaccctctccctgggagatggcttccccttccttccctggcctcactgtggcctgggaggtcacaggtcggtggccacaccaggcctccttctcccatctgctgcaccaccacacctgccttcctggagcaaggagggagcttcgtttcttccctcccttccccttccctcccttccctcccttccctccctcccttccctccccttctcttcccttcctttcttttcattttgagacagaatctcgccctgtcgcccaggctaaagtgcagtggcacaatcttggctcactgcaacctctgcctcccaggttcaagtgattctcctgccgcagcaggagaatgttggccaggctggtctcgaacccccgacctcaagtgatccacccgcctcggcctcccaaagtgctgggattacaggcgtgagccaccgataaggagggcgtttctcaaagcactgacaggggactgtgttctgaaacaggtgctctggtcaagtcgaaacaggtgctctggtcaagtcagtttgggcaacactggtttaaacagttacttaggtctcttggctgcaagactgatcagagcctttactcttctaagagtaccctggccttctgagtgtgtaatggaatagtgttttgcaaatggtttggtctccctttaaaaaaaaaaggtgcagaacgtcgggctgcgagagagtgcagacactgggcaccgatggtaagggctggggcagctccacctggggacagagcggaagggcactgaggagctcagctttccagcagccttggggcttcactggcccacacacccgtccgacccggacacatgccttctgggcagccctgacaccccagagcagggccggactcccagccagagccaataaccagcacagacggtgcctggcaccaccaccgaggccaagcctacctggtcgcaggtaaagcgtcactttttgtggggacagctgcttctggcccccattgtggtcttcctgggtttcagcgaggcttgtggggtccatgatgtcgtcagccgcacagcccctcatgagcagctgtggccgggtgtcgcagcgaatggagtcaggatcccccggccctgtgaagttctggggagggggagtcaggggtcaggagggggccacactgcgggacctgcaggaggctgactggccatggaggactgaggacccaccctgtcccctcctcctctgcgcctggaatttgggacagaagtccctgtggacagagacagggagctccttcagcctcccagacagcccctccctgaaggctcccggccacagcagacccctggggggcagggtatcgcctcctcctctgcctctagcggcagaaaggactcaggacctactctccagcccgaggctgacccaagaggagaggcctcagcgtcctctagcagctggcccaggggcttcaagcccttcatcagcagaacctttgtccaagggagttgctgtgtcccaaaggaacgtggcagtccctaggcccccaagaaacccagaacatgggcagggttctgggccaagcccctcaaagtttagaagaacaaaagctggaggggagcctgggaggcctgggcccagggcgctttcctctcagccactttgtccctgcaaatcccctggattctgatgagggctgtgtttggtgggtcccgtcactggccccgagcctgctgcctctacagggaagggtgctggtgatgcggggccagaagcgcgtgtttgtgcacttgctttcgtagagggaagctcaggaggataagcccggcccccagaggctggtgagtcccgcaggcaggggggcaggtgggaggggagggcgacagtccccagggtgcctctttgtagggctctgacttttggaaccacagaattttttaaagaagtcctccagaaataaaagtacatcagcaagtatcccagcaagagagaaaagaaagcctaaatgtaatccacacagaaacaaacaaatctcactgaaaggtgtttatttcagaggagctgaaaacctccagaaaggggagggaaaaaacccagcctgaccaaggtagtttccacctggggcctggccaccctgctcagtccgaggacagacgggagccacccggcttctcctccggggactgctcgccgcggtggcgtgggctggaggacccaaagccgctccctgtgggacgcaaaattgagaaatgaggaagctgctgacggtaaggaatgagacaccacttctcctgctgccctccccttcttctccaccccctccccttctctagtttataagacaggagaaaagagagaaagcaaaaagttggaaagaaacagaagtaagataaatagccagatgaccttggcgccaccacccggccctggtggttaaactaataatattattattattattattattaacccctgaccaaaactactggtgttatctgtaaattccagacattgtatgaaaaagcattgcaaaactttctgttctgtcagctgatgcatgtaacccccagtcaagttccccacacttgctctatctatcacaaccctttcatgtggaccccttagagttgtaagcccttaaaagggctaggaatttctttttcggggagctcggctcttaagacgcaagtctgctgacactcctggccaaataaagcccttccttctttaaccgagtgtctgaggaattctgtctgcggcttgtccggctacaacggtgctggagcccagactctcagggaaaggaacccgagccgtcagaaaaccatctgattccaggctggggcaagggacatggagatgggcctgcagcatcatgttgctccagaaagcaagaaagtgctcagaacggtagaacggggatgcatggacaggacacgcagccagacccagcggatttgagcaactcggggaagaaaggacagccacagatcatgcactactgaacaaaataaaactgtgggtcacgctgatgagagagaggctgcagagaaggagagacccttccttaggttggcagccgtgagtggcaggcggggaccagcacggcaccaatctgcagccatcgcagtgatggcggcttcaggcggggacctccgcggatgctgagcctgcgggtgcgatttgatgagggcagaacctcaccagcccacagtggctgcgaggggatcatgcagcgggatggggaggccggggggatgccgtctcagcagagccgtccacgctgacctcatcaagactgggacggggccacagcagtgcctctcatgggcacttaggacaccgtcactgaggggctcctgccaaagcacacctgagtccaggcagaggaaactccagacaagacccccgagggtcatgctacaaagctgctctcctgacttcctcagaaacgcccaaggacaggaaagacaaagaaagctgaggacttgtccagattcaagaagcccaaggagacggctgagcgtagggcgagcctgggtgaggagattcagagcgttagacggctgagcgcagtgtgtgaacctgggttaggagatttggggcctgagatggctgagtgcagggtgagcctgagtgaggagattctgagcctgagacagctgagcacagggtgagcctgggtgacaaaatccaccaggaaaatatgctcacgaagacatcattgggacaaccaataaaatatgcgtagtgtgtaggtttgatgataatgagataccaatgctgaatttcctgaatttgatacatgaatttatcaaatatagatatacatgtatcaaaatacatttacatcaaagtacatttcctcttggccaccttgtccctgcaaagcccctggattctgataagggctgtgtttggtgggtcccgtcactggccccaaacctgctgactctgcaggaaagcgtgctggcgatgcggggccagaagcgcgcgtgtttctgcacttgcttacgtagttttgtaagtgaaaaccttgttcttaagaaagacctcccttgaagtactaagagacaaagggctccatgtctacaacctactcggaaatggctgagaaaaaatacaagtgtgtgttctgtgtgtgtttccaaacagaccacacatcagaacctcaggggccccttgaggggagggtgaggccagggtctggggaccccctcaaaaagaaaatggagttgttggtcctctgggtgccactggcttcaggggcaggaaagggccctcacccaggagctgggcaggtggggaggggtccaggaggcacttaccagcttctggcaccaggtgcagccgggccccgactcgatgcattcccggcagctgctgaccttgaacttcgtgcactcctgagagaggactgagggacgaggccggctggtgagtgggtgctctgggccgccctgcccacacccaagggggagtagagcaggaaggtcagaggaggcccaaaaagacagggaggcagcctccaggaggagaccccgcattcgccaccacccccaggtgcaaagaggggccctcgggaaacagcacagctacagcctcctggcacgtgcggagacgaggcctgagtccccgacctacccccagtggcaaggtccttccccagcctcccgggaacttctgtctatgggaaagtgagggcaggccctgttctccctgattggaatgtcacgcgtggagtcccctccgtggaacacagaactcaccgcacccgagggagagcagccccaccagggcgagcagtggggggcgcaggcccagcatgtcctgtggagggaaggggtcttggtgacggtctcaggcccaacccctggggctgaccacccatgaagctcccctccagctggcctgggacaaggagctggggccctgtccctgctgcagggggtgggttagggtcaggccagcacagctgcactgggcccagctgccaacagccagggagggagggatcccgggctcagcagtgcgggcagcacacctgctcagccaggcacccaggacagctgcagcgggcccctgcagaggcacacaacacaggcacacacacacatgcagacgtgtacacacaccacacatgcacgtgtacgtgcatacagatgtgtgcctgactgcatgtacacaccacgtgcatgcacacaccacacatatacatgcatcacaccacacatatgtacacacagagatgtatacaccccttacccacaccatactccccgcaagacactacacaccacacacaaatatacacatgcacacgtacacacacatacacaccacacagacacacacaccacacgcacacaccatacacacgtgcaaatgtacacgcacacaaacaccagaaccccacacacccggtgtgtgcactctgccccagtgtgccccaggtcctccgtgagcagagcctgtgcttggaggagagctgggcttggccctgtctctctgtggcagaaacatagccaggaagagaaagctggctggatgcccgcgggtgccaggctgtgtgccaggaagagaaagctggcttgatgcccgcgggtgccaagctgtgtgctaggcctgcccaggagccctgcagtccctgccaggtgggaaaaaaagtcacctgacttgcccaagccaccagttgccggggtcctgcccttttgtttccagatacacacccaccccgtccttaacccacgcatccacagccaggggcggctcagtggtcactcacaggccctcggccccagaggcaaaatgacggaagcaggcctcagcctggtgctggaggccggcagcacctcctagcgggcagcagggccgttccacccctgggttcccttccctccatccgggaggtgcccaaaccaggcctaggtcggctccttggggggtcttagggcttcctaggtggggtgggcccctgggtctgacctcccaggacctgagaacattatagctggctgggacccttttatctggcaccaagaaggtggagaggtactgagaaggggtacccaggagccttcctgtcatggtgggcaggaagacatttccgttaccctggggctgttgtcagaagcaaagatcaacacacctcctccagcaaatgccagttcctgtcacggcctcccaggctgctggggcgttcctgccccacacccttccctcgggtggtgctggcagggccacccaaggttcagtgggcagacccaagccagcagagccccaaactagggcctgccggctttgaagacagcgctgggtgctgtgctgtggcccgggaggctcgggtgccctcagccacaggccctggctcccctccatcccccgaaagccctgcacctgtgctgggggctctgaggccaacggaacacccaccaggggcccatctgaggatcccacagcttagacgccccaacaagccccaaggtcctgttgttttggcagtgacctcattccctggttcccagcaaaattataatcagaatacaaaaatgtcaaaagggaacccttgatccttcccgtcctggggtcaaaaacagaacctgcaccctgctgtaacttcctggaggaggtggttttggttcacattgggcccaccctgtgtctgaaagcccccatatctctgatcgttgggggttgtggttcaggccgaggccagttccagctctccatctgggccccctcaaagtcctgcgcctggactgacctcggtgccacgagtgcccaccagcccctcagctgatcggaggccctgtgcgtgctggagctaccccagggtgcagggtccagccagcttcaggactcccccagggtgcagggtccagccggcttcaggactcccccagggtgcagggtccagccggcttcaggactcccccagggtgcagggtccagccggcttcaggactcccccagggtgcagggtccagccggcttcaggactcccccagggtgcagggtccagccggcttcaggactcccccagggtgcagggtccagccggcttcaggactcccccagggtgcagggtccagccggcttcaggactcccccagggtgcagggtccagccggcttcaggactcccccagggtgcagggtccagccggcttcaggactcccccagggtgcagggtccagccggcttcaggactcccccaggtcgcagctgcgccaagtggggagggggtgcagacctcccctggcagccccagccaggctggtaaggactcacaccccagctccacgctctccctggggccgcagacatgaggtctccgcccctaacacagtcgtgaccagtggcatgcaaacacttcataccctcaaatggggaaactgagggccccagcagcagcaagatatggacctggtgcccagttaccccgggcactcccacctgcccacagggagagggggtgcaccttgattccagcaggattggctcagagaccacggcaccccaaccttgaccacaggaagggggctggtggggagccaccttctccccactgttgctcctccatgagcagccctggggggcttggagctgggggcacaagagaagccaggccctgccccaccccccaatgccagtggctgagcccagacaaacagctggggatgaaggtccgctccaggaggtaaggcagtgcactgagcctggcagccagcctcccttctgtgggagaacagggcagggcagcccctctgcccagcagccaggatggcccacggaggtccagggcctcacctgaggcctgagagaccaagaccccatcaggcctatctgcctcagtttcctccatgtgcctggaggtggtcgaagggcctgtgccagctccctgggggatgggaatgggtaaggcacagatgtagggcagcattcgggcaaacaggtgcctggccactgtcacctctggtgccctgaggctaagccggcagagctgcagggcaggaggggaggaagagcacagacaccccccaccccagcccctgagctggccccagagctctggcctggagcctgatcaccctgaggccctccctgctgccccacactgggggcaggtgccctcctcattctccaaggccctccctgctgccccacaccaggggcgggtgccctcctcatcctccagctctggacatcccccatctaagggcgggcgggtccccttaccaagacctaaggtgcaaaacccaaagctgaggctgcttaggaatccacagccccacaggcctctcagaaccttgcatcagagtcgcccttgacctcaaccctgcccgagaaggaagtgctggtgcaaccccagcccagctgcaggaagtggtacctgtcaccaagtcccctgcacaggggaagcagggggctgagggggcaggaccagggggacgaggtcatccttccccggagaacccctcaggggccgggcgcccttccctcccgggcaccaaatggacacagctaacaagaaccacacttcacggtgagcaaagctctgaacattcaggctctgagacacgaaagcggcgtcagaagagacctgcagcagatccgggccaaatcacacacaccctttcacagaagtcgaggacaggagaacaggagcaaacacaggaaaggaagaggccagcctggtggctgacgcctgcaatcccagtgttttgagaggccaaggcaggagaatcacttgaggccaggagtttgagagcagcctgggcaacacagtgagactcctacctctacaaaaaataaaaatagaaaataaattagccagacatggtggcatgcatctctagtcccagttactcaggaggctgaggcaggaggatcactcgcgcccaggagggagagactgcagtgaaccctaatggcactgctgaactccagcctagttgacagaacgaggccctgtctcaaaaaaaaaagaaaagaaaaagaaaggaaactttaagcaagacagcagagagagggcagagcctatgctgggagaggaatccagcggggtcaggcttcctttttatttttttgagacggagttgcgctgtcaccggcctggagtgcagtggcgcgatctcagctcactgcaagctccgcctcccaggttcatgccattctcctgcctcagcttcctgagtagctgggactacaggctcccacgaccacgcccagctaatttttttgtgtttttagtagagacgaggtttcatcgtgttgatcaggatggtctcgatctcctgacctcatgatccgcccacctcggcctcccaaagtgctgggattacaggcgtgagccaccgtgcccagtctcaggcttcctttttgcaaccccgtaaaaccctaagacgagactgcttgaggaaccagaggccccgcagacccattggaactttgcatcagagcttcctcctgcctgtgctgaaacccaccttgcgctgtcctagaggagaggcactcgcatcaaagtgactcggaggtgcgcgggaagtgatggacgatgccgccaggggacaaggttggaaggaagaggacatgggagccaacccctgcgctgggaactgaaggctcaagggatgattataaactaggcatccaccttttaagccaaaagccagagcatcaagatggactcatttctgctttgtaggaatgtgataaagaactggagagaagtgccgtcaggtggggactggaacactgtccttggatcacagaggctccaggaaatccagggacaaaaacaggtcagatcaaataggaacaagtcggagcagagaggatgcaggaaaacccagcccatgtcgcctctgaacctgcgaccctgcaaaagcgtattttcccaagggtcagggagacgtgttcctactgttggtttgactatctgtgaagtttgatagcacagttttgtttgtttgtttgtttttttgagatggagtctcactctgtcatccaggctggagtgcaatggctagatctcggctcactgcaacctccgcctcccatgttcaagaaattcttctgcctcagcctcctgagtagctgggactataggtgcacaccactaggcccagctaatttttgtatttttagtagagatggagtttcaccatattggccaggctggtctcgaactcctgacctcgtgatccgcctgcctcggcctcccaaagtgctgggattacaggcgtgagccactgcgcccggcctgatagcacaaattttaaaggccacaatttctggccaaatgaaataaaatgagacaccccacccccccgacacacacatattaataaggaatgctaaagtactctgctaaatacctgaagtcaaagggaaatcaaatgatatttacagcattttagacaaggggacaccactcctccatctaacatgaaggagactgtctgttcctgggtggcgacgtgaggccgaggccccggacactcttgctgtggacataaaagaatggccacaaatgtgtaggacttcagttttagggaataaaacaataaaggaaatagaagaataggtatctaagagtaaggaaacctcagcataaaagctaaggggaggccgggcatggtggctcatgcctgtaatcccagcactttgggaggctgaggcaggcggatcacctgaggtcaggagtttgagaccagcctgagcaacatagtgaaaccccatctctactaaaaatacataaattagctgggcttggtggcgggcgcctgtaatcccagctactcgcgaggctgaggcaggagaatcacttgagcccgggaggcagagggtgcagtgagctgagatctcacctctgcactccagcctgggcaacaagagtgaaactgtctcaaaagaaaaaaaaaaaaaaagctaagggggaaaatagcaagaagacagactctaaaaatggcacatgttgtactaacaaattgcatagaggaaatagctattatctctctagtgcaaaaggtaaatggtaatcttcatctctaaagagatcttagaaattaataacaaaaaggtaaatactccattcaaggatgtttcaagggtgtggcaccctgagcaggtaattcacaaaagaaggaagaaaactggctaagaaacatatgagtcaccccaggaaagaaccagggatttcagccaaaatatcttgattccctgtgtagccgtcaacgtgtaagatgctttggcggtttcggtgcctgcgctatggagtcccacacagcaacgaaaacatgcaaacagctgctcagggcagcttggcttcgtggtaaaagtgaatttatggggaaaaaaagagagacacagttccaaaatattctgcatttctctgggtggtggcactatgagtattttcaattttcattattcctgtttgtattttccaccctttttgtgataaatgaataaaggacattttaaaaatggaatttcatggtggccgacgaattatgctgaaattgctccttcggattccaaagctactggctttcttgttcccactgtgacgttgatgaggacgctgcttcatggcagtgggacctccctgctggcatgggcttgttgccactgtcactcacccattcacccatccatgggacaggggcttgccagcctctcctctaggcacggcgcaggggctgagagctgcactccaggactcctggactctgccctctgctgagactctcagcacctcttttccccaacacctaccccaagtttccatcacacacagaaacctccaccactcccaacaccaacatgtgtccccagcgaggctgtttacaaatcagctgggcaggaaggtgttcccctggggctaactcttctgcactctcagaccctgaatggccggagagaacacgcagcccggggtgggcaggggcctcagctcaggacagcaccagggccctctgtgcttgctcagggcctgggctccacacacatgggctcggaatcgacaaatgcaaccacctaatcaatgccccgtgtcagtgccagtttgtgccaagcagaatgggagggataattgctggcaccaggtccggcttggggtgggtatcacccacagctccataattgctaggcgcccactgcagagccccttgagttggggcttcccagcgacctggcctgtacctgctgggcaaatgcctgtgtcactgacccctgtggcagctggcattctcctccgggaacgggagccagcctccggtgacatggcctcaggcaggaccacggttctctgacacaggacacgagtgcagcaaggggggcccacacaggacctgttccatggaatcgccacaggcgtcacgctgccccatccacagaggcaaatgtcccacagccctggtacctggtggggcccggcctgggccagagtggacagacctgggcctggcaggagccctggggaagtgagttcaagttacacggttgactatagagacagctggagtgcgcacaattggccagaccacccctcctgtttcacagatggggaaactgagtcacgggggaccaaatagcctgctcaccccatgccccttccagacagggtgcagatagggcccctcccatctcctggatggccgcggcccctgtgcagaacttccttcatgggcacctcgctgtctgggggcctcttccccagggagtctcctggtggtggccgtgttgcctcaggctcactgtgcactaggcaggtcacgtcgatgccgcctgaggggcaggggttaccaccctgtggttcaggtgagaagctccaggctcaggagtgtccagctgcctgggcagtgtttggatctcatgccagcccctgccaggaggccctgcttctccagcccagcccacgcccaccaggaaatgcccctatttactcccttgaggcaaaggcccttgggtggctaagcgtcccctctcccagcactcggagctgagcgtcccctctcccagcactcggagctgagcattcccctctcccagcactcggaggcacctgcagttgctcagctgttcattgagtgctgggagtggaaactcatacgctgagcggcagtgacgctgcggagctgacaaaccccacagcccgcccggtcacctgcttcaccgagggccacagcccccccggggtcaggtggccacaggggtcctggccatgtgggacatctgttctgtggccctgctcaggatggcacccggcggggactggccctggggccgaggcatgggctcagccgccgccctgcagggacgtagccagggacctcttcccagcagagggactcccccactcatccccagaatactgaggggcacgctgggtgccaggctggcagggaccctggggattctgctgtgagctggatggggaaggagttccttcctaaaatgtggagtctggaggccactcttggtaaagtgctggcccccggggattctgcagtgagctgggcatggattctgcagtgagctgggcttcactcatggtgaaacgctggggtgacggcagacagcccagagcttctagcagctcatttctgtgaagcctccagaatccggcctcagcccccaaacccgcaggcgttgcgccaccgtcacggggaaggcgagtgacagcgagtgtcccctatgcccccacagctcgctcccaggctgagctctccggccatccccccccttccccattgcagccatgccacccctccttctccccacccaggaactgacagaggagaggggccccggatggacagggacagcagggcagaatcccagctcccagatccaggggaggggggattgggtgtggggacggtggtgcaaggggtggtgccaggggtggaggatgcatggggagggctggccccaagagtgcagtgttgggggaagggggccaggtgggcctgggacccaggggcgtggcttcaatccccctcccaccaggaccttgggaatggcctccaggagcctgttgtggggaggccagggtcaccagctgaaccaactcgaccagaatcgcacagcggtgcccgctcccctacagcaagacgtcacccaggggtccccacggaggaggcagggaagctcgagggtcccagaggagcatggagcatgtgccacaccacaccacactacattacacatgtgcaccatacatgtacatacaacagactccccacatcacatgcgcacactcgcacaccatacatgcacacacacacaccacactacgctatgccacacacgtgcaccatacatgcacaccatgccacactacacacacgacactacacaccacgaaccacaccacaccatatcacacaccacacactgcgagtcgatctggagatggaatcgctgtagccaggcggggcagcatgcagacaggagggcctaacacaggcaggcgcagcaggttcacagaggaggccccgggaacctgcctcctgcccagcccggagcaccaggaccccccagccgtccccctaggggcttgtgggcccagcctcttcctggccttgccggcctcacagccccttgtcctcccatgccggccccatcctcagccgcaagcgctcccagcacaccatgtggctctgctcttggtggcaggcacttccccttgccgggtctcaaaggggaccctggagcagacggtctggagaccccttcctgccagacacccctgggccggggctataagcagggccaccagggtcactccaggctggggcaggagagtgcttccctccaaaaatcaccgtggacatagcggggcctctgcacactcaccctcggtgtgctggagtcctcggcggtgctcctggctgggcgtgggggctttgctaccagtctgccctgggtcacgtctagaaacctcagctggaggcgcgggtcgtaaagtcctgacacttcctgttcctctcagctcctccttggaggaagtggtgggttgcaccaccgtggcccttcacccctgcccctctccgctctacagcagctctgatgtcagagagcggccccttgagacaggtgggacatgtcatttctcacatgaggtcccggcgagaaggacctgcttccatcagattcacacttgggagaggggcccggcctccaggagcgccaggcagaaagggcacccattaggaagaagaacacagaggccatgggagtgaaaagtttgatgctggaaagcaacagtagcacattctgctacagagcggaatgaaaaaccctggggagcaaattcctgagccagagaatggagcggaggaaccagccaaggaggataaagaggtgggaacaggcaagaaaacctgggtgcgtgcacgcattgacatccacctgcatgtgagggcgggaggggacagaacagggacagcgaggaggagacactcaggtcacaggaggaaggctgcggatctgggcggggacgtggattgcgaggccactgaacaccccagggatggatggatgaggtcctgttaactagggacattaggaggataccacagaacacgaaagggaaaatactacaggctcagagagagagagaagggagaggaggaggaggaggaagaggagggaaagagattatacctagaaaaaaaacccaaatcagacatcttcagagcaaggactcagacacattactaccctaaactctgttttatttatttatttatttttatgttttcagttttttttgagacagagttttgcttttgtcacccaggctggagtgcagtggcgtgatctcagctcactgcaacctctgcctcccgggttcaagcaattctcctgcctcagcctcccaagtagctgggattacaggcacatgtaccaccacgcctgggtaatttttgtattcttagtagagacagggtttcactatgttgaccaggctggtcttgaactcctggcttcaagtgatccatccacctctgccttccaaagtgctgggattactggcgtgagccatggctcccggctcctaaactctgttttaaagatgtcttgcagaaatagacatgaagaaatccatgagaaatacaagagcagatgatacaaagttgggcaaagaaataagtaaaaattatgatgtcataacctgttgatttaaaaaatagtggtaagaatattaacgctgtgaaacaaaacgcctagaggactgggttgggaggggccagggagcacattgccgttccatcctatctggggaggaatatagatgcttgtcagtgggcattttgatagaaaatatctaagtatatatgctaacaattcaagagtctccttaagaataaaaatagcatgtatatacctgaaaaaaaatatgacaaatctttattttgggcatggtggctcaaacttgtaatcccagcactttgggaggccgaggtgggaggatcacttgagcccaggagttcgagaccagcctaggcaacatttggagacccagaccctcatctctacaaaaaaattttctaagaattcgccaggcatggtagcacgcgatatggtccaggctacttgggaggctgaggtgggagaattgcttgagcccaagaggttgaggctacggtgaaccatgcttacaccactgcactccagtctgggtaactgagaaaaaaaaaaaaaaaaaaaggcaaatcctttaaaagaaaaaagtaagggaaaatagaacaaacaagaaaggtaaataaaaaccaaacaataaaacattgggaataatttcaaacccatcaggaatcacagcacctgtgaatgggttacattttcttgttttaaatcaacaaggtcttgcgttgggttttagaaataaagagacaaaacaagttccaatgaaatgttctctgtcaagggtatcttctcattacagacttagcctagaaaataatgaagaaggacagaaagagaataccattctactacacccgctgatgacttaaagtaagcaatgaccctcgctgcgaacgtcacggacgcagcagacgttatgcacacacctttaatgaattagtcttgatgaaataacaatagaaatcaagaaaaatagaaagaacaaatgttactattgagcctgaatcaggtcgaactttttagatctacaaagaagcatcaggagggtgtgttagatgacatcgtagggatgcaattagcaaaatccaggctgaagaaaccctcacaaggcaaacagcacagtacaagaggagagacgaagggagagagaccctttagattaagagatttaatctcttaatagaaccaattgcaatgcatggaccatattttaaaatcattgttaattgttttaagtgtgacaatggtttgtggttatgttaaaaagtccccatcttttagagttacatgttgaaatatttgcagatggtgcagtataatgtttcagatttatttcccaataaagaggggtgggttgggttgggggagagtcgggagaggtgttgatacaacaagatcacctgtgagttgattatttttgaagccactgttggggacatggggcttcactaatctattctctctacttctgtagatgtgtgaaattttttgtagtaagattaaaaaaacatttcaaggaagtgtaaagttattatttcgcgggtataaagttcccgttttgcaagatgaaatggttttggagaagttggtggtgatggttgcacagtactaagtgtccttaatgccacggaaatgcataacttcaaatggttaaaatggtgaatttatgttatgtatattttatcacaattaaaaagtaaaaagtgtaagaaaggctctctatcagataaactgttaaaagagaacactgaaggctgaaaataaagaaacggaaaatacacgtatgtgctagaaaatactaacgaagatatcgtgtaacatcaaaaagatagaaatcaaagcaaaatgcatcaaatggacaaaggaagatgtagccaatgagagtcagaatccacagacagttcagcagccataatcctttgtgtgccgaacttcaaaatatataaaacaaagactgacaaatatataagcaaactgacacagccccaaacagcaaatatctctaacagatctctctcagaaataaacacatcaggccagtcgcggtggctcacacctgcaatcccagcactttgggaggctgatgtgagcggatcacctgaggttaggagttcaagaccagcctggccaacatggcaaaaccctgtctctactaaaaatacaaaaattagctgggcatggtggcgcatgcctgtaatcccagctacttgggaggctgaggcaggagaatcactcaaacctaggaggcagaggttgcagtgagccgagattgtgccactgcattccagcctgggtgatgagaaggaaactcttactcaaaaacaaaaacaacaacaaacaaacaagaaaaaatcaaatagaaatgcaaatttggcaggtagagaatttgaggaacgtaaccattcgtctccaacttaaacacaattatgttacaaagtgggacaatgataaacacataattactagaccacaagggaaataaccacatattctaaagcacaaagaccataaggaggccaaattcacggacacaattgaatgaaattagatgctgtccaaaggatggcatgaaagaaaaaaaacagcactcctgaaaagtggacccaaatatagcctagatcacatacatccatggtgccacactcacgctacggggtaatgaataagagcccttgaagtgctgctctgaagcctcgtgacccacagatccgtaacactgagattcttctgaaaagcaaaatgtagaaggaggcattgaagaataacatgcacctcgtccctgcagacccacacacccctagagcaggacagtggttacccctgaagacagagaaggctacgggcctgggagatggaagcagagggcttcaaagttctattgtagagttttctttactaaaaaggaagaaaaagttctgggcaagtcaggcaacatgttaagatttggtaagatgagaggtagctgtttggggattggtactagtgctctccatgctgttctgtattcttaaaatagtttatatcttttttttttttttaaaggagctaggaggaagtgactgcaaatgagcagaaggatctttcagggggtggaaatgctctgaaattagattgtggtgatgattgcacaattccgtaaattttctttttgttgctgttgtttctttctttctttttttaatagagactaggtctcgctacgttgccaaggctatggtgagccaagatcacaccactgcactccagcctgggtgacagagtaagatcctgtcagaaagaaagaaaggaagaaggaagggagggagggagggaaggaaggaaggaaggaaggaaggaaggaaggaaggaaggaaggaaggaaggaaggaaaaagaaaagaaaaaataaaaactgaactcacatgagaaccacagcccacaagaggcaggtctggacttgtggtctaaccctaaccagactgactgctagcaaaacaaaaagatcattgttgtccagaggattttagtagaatccagagtcttattaaataatattcaaaatgtccatgatacaacccaaaagtactcaaacagcaacaaagaaaaccttgagaacttgtaagagaaaagataactaatagatgccaactccgagataatcccaatgctgaaatgatcacacggagcattaaaacagctgttagaggccgggcgcgggggctcacgcctgtaatcccagcacttttggaggccgaggcgggtggatcacgaggtcaggagttcgagaccatcctggctaacatggtgaaacctcgtctctactaaaaatacaacaacaacaaaaataaatcaataaaaataaaattagctgggcatggtggcgggtgcctgtagtcccagctacttgggaggctgaggcaggaaaatggtgtgaacctgggaggcggagcttgcagtgagccaagatcgtgccactgcactccagcctggacaacagagcgagactccgtctcaaaaaatatatatacaataaataaataaattaattaattaattaaataaaggctggtggagggagtgaaggggaggggctagggaccgtggggcttcccagagccgtgaccttgctatggggggacccagacctccattccggggactcactcagcactcatcttactatcccccatctgatgtgcctgttgcacaaggctggaagtcagaggctgtgcacgtttttctttgtggagacaagtgagtaattggtgcgtttagtgtaaaaatatcaggtgtggctgcacggagtgaaaaatcacaggctccacggagccgggaggcctgctgccctgccctcttgctttgatgaggaaatggcgaccgcagaaggaaatgtagcagcaccggcaaccggcatccgtggggccacgccgggctgcttcccagggccctccagccaagcagccacaggaaagagtagatgttgatcccaagctaggactgaggagtccgtccctaagagccgagggagtcaggtgggcgaaactggccgcatgtctgggtacaactgctcagggtttctcatctgctgaatcaccaagctaggttctgaagccaggcgtgagtgagcaggactggagcaggattctgggaacaatcttttccctccagtcagcccagaaattccatttgcagtcactttcacttatgtattccagaaaactacctgctgtcatcaggggttggttggttgagcctttccctgtgcttgcctggcagacctgcgtgctctgaggctgcccgaccctgagctccagaacagaccatcgagttcaggagacaagcatgtcagccatgacacaaggcagatgagagggacccccagcgtccacacgtggaggcagcgggggcagccggtgagcatagatggggaaggagattcagagcctgagggctgctctcctgccctcccatcctggacactggcctgggccccccagcttcccttcgcccagcttccacccccataacacacaaccccagagcttgggaaggaggtctctctgtgacaggtgggattctggaagtttccacggaggagaccccataggagcagggtttgaaggtcaagaaagatgctaaggatggagagggccagtggggagagggtggttccaggctcacttcacagaggtgcttggggagctgcaatattttggcagcaccaagggaagagtcaggtcagtgaggttcataagggatgagaaaggagtctaaccagccctggagacccctggggtctggccccacagggagatgtccaagtggcagaaagtcccttcctgcctggagagcacccccacgaggaccctggggccacccgggaaccgctgctccctcccagtcactcaccacacttccctctcccgcccaccctccaacctgcctgcaaattcccctgcaacccaactctggtctcctcccaaccctgcccccacgtaggcctttttttttctttttcacttcttccccccagtgacttccttctgcagtgttgattcagctccctttgaaggcgggtgagaccttttgcaggctgggggcaggggcgggggcggagaagagggctgcaggcagggctggcagaggggaggaggtgacacacactccctggaggcgagtggggagggctcggggcaggaaatggagttgggtgccccaggtggggtgctccaacgagctctttctcatgggatcccccacagatccatacaaacaggctgaccatcagggctggtcccaggccaccaggctgggtgcaatgcagaaatggagatctgccccggggaaggcaggtgagtgtaggaaggagggagggctgcgagaagctgggggcagcctccatccccctgtggcctgggtgggcctgtgcccccccaaccccccgacgcagcttcccacactgggagcacagttcctccctcctctgccttcctctgcgtggtgtggctcctccttgagggagagagctgaggaggtggcattcttgcttccctgactcacccaaaggaagatttcacagcccctggcaagggctgccagacaggctcacctgtcaccccctgtccagggacagactgaccggtagccttggctgggtggggagttatgctgggaagtcttccaggccccctgggggtgggaagatgctcaatgttcaaaggagatggaacgaggaaaacagttaagcaacgatggactccagggggaaaaccggagaagaagaaactgtaattccagtccgtccacatggcccagcagtgaacgacaattgcatggtcagagagagcaaaagcaccacgccgactgaaagcagctcgaatgtggtggggcagtgggagataatgccctcatctaccaaaacaagatctgccaccttcgcagaccactaaacctcattcctccacccacctccccacccccatgaaggccaactgaccagagagcagggctcccgagggtcgggtcgggtcgggtcgggttgggtcgggtgggtgcctcttaccctaactgaggctctgccctggactcggagtccacttgctgtcaaagcatgccactcttctttctgatacttgacatatttcttttcccgttcaattcatggtttctgcccaaacggagccacgtgaggacttctttggggatgtgtctccaagaaaagtgtgggctgccttcctcaccctggatgcctgtgggcagccttcctcaccctggatgcctgtgggcagccttcctcaccctggatgcctgtgggctgccttcctcaccctggatgcctgtgggcagccttcctcaccctggatgcctgtgggctgccttcctcaccctggatgcctgtgggcagccttcctcaccctggatgcctgtgggcagccttcctcaccctggatgcctgtgacttggtttccatgggggcttcctaagctcagggaccccaagcctccatcaaatctaatgacccgccttgtctctgaacacacctgtgttgtccccgagcccctcaccaaccccctctgcaacccggcccacgcatttcccatcctgaagggtccagctcataggccggcccatgtgttccctttacccctgctttgtccctacctggtggggagctgtcccttctgggccctagtgtggcacttcacacacaaatgtgtcctgtgggtggtatctgggcctccccctgcagtgaggggatgaccaatgtgcagagctcactgggcctggatatgggctcgggtggcacagaacagagagaaagtgctccgtaaaagtgagctgcgatgcggaggtgggcaagctcttccctggagggggaagagctctcaacccagagggatctgaccaggaaggttcaccccccctccacccaggaagcccctgcagacagtatgtgttttaggctttgctggccaaatggtctctgccgcgactactcagctctgccattgtggctgcagagtgaccatagaccttctgaaagtgaatgagtatgactgtgttccaataaaactttattgacaaaaacaggtggagggccagcctaagggcccaagtttgtaggtctctattctagaccagtgattctctggagaggaatggggcatggggagtggggacagtgtgtgggagaagaggtgggacacaggcacgtgggaatggtgcggacatggaggacattggaggtggggaagagctagagaacctaaacactgacgctggaccctggtcaacactaggtctctccacagcctcctcttttagcctctccctccagtttcaaaatgactcctcctctgaggggactcaggctccccaccctgctccccagttcccaccagaaaccccaagtgggtgttccagcctctgccccacaaggcccccatggaaggcagcaccgccaggcagggacctttcctcgctgcccctccctcttccagttctgagtcctgtcccggagatgacctctcaacccagagggacctgaccagaaaggtctggccccctccacccaggaagcccctgaaggctggagggcagccctcccccctccctccccctgttagtttttctttctgatagaaacagcagcaaccgctaggcacctgctaggcagggggctgcacagcctcaggtcagttcctgaaaggcacctttttccatttgtaaatgaggtgacaggtctgcctcccagggatgagcagatgaagggttgggagtgcagagcctgggaacacggagtggcagtggggactggggcccagaggctgctgagtgagggaaggctaggggcagtgaagctggtgaatgaggcaggggcagaagacagggtgggggaacatgcccagcgaggctggtgaatgtggcactgcaggggcagggtgggggacatgcccagcggggctggtgaatatgccaccgcaggggcggggagggcagaatatgcccagtgaggctggtgaatgcgccaggggcagagggcggggagggggaagatgcccagcgaggctggtgaatgtggcactgcaggggtggggtgggcggatgcaatgatgagcatttcctccctggggccagcagagcaggggtgaggctgagtgggtatattactccgatttgggtgggaccccatgcagtcacacgtgggggacgcagggctgacagccttgcatgaccctttcacactttagccatagcaatgccaagcccagagaggctgcaaggccctggggagaacagaggccccggaaggggtggccagctgggcttcactgcagtcctcaccagacaggattgagattttaacgtgttaacttgttttctgtcttttccaaattgtttatggtagccatgcattaattttataatcagaaaagcatgttattataactcaagttaaatggctccaaaacaaaagtacccagaccccagagcctgcccctctctagctggagagagggacgaagtataaggaaaaggaacggaaagctgaaaggacccccgggctctggaacccgacccaagggtgatgccgccagggctaccaggaagcggctccgtgctgggctcagccggtctcctacccaccccagcacacctcagcccccagcctcttcctcccgcgcctcccccgccctcaccacttcctctcaatggtccctggggattacagcacgattatttttattgcaagagtttcccaatgcgggaactcacagccccaaagagtttgcatctgagcttcctgtagcatcctggggcacggacaggcggaaccgggccatcagccgtccctgcgcacagaggcgcacagattggatccggcctcgcagtcccaggagccaagaggggaggcacgcgtgccggttctcggaaattcattatgggaatgtgcgcgttgtggagatgctcagaccgcgaacagtactgcgggaacccaaacgatcatttttaaccccagacgtccctgaaccaaagccaaagtctacaggtcactggggcagaggccgcccgaaaccagctgtcccctcccggcctaggcgcgccaggtccccgcccagccggggcgatcctttggtcggacagtgaggttgggagcccaccgcacccaagtgccgccgcatccacccggcgcaggcgacccccgacgggcagccgctcaccttctcctggccccgggcttcaggaaaactgcctggaggtggccggggtctccctagcggaggctgggcggcgggcttcgcgcctgcctcagtctcccaatccgtggcccgggggatggagcccgctgcgcgcagaggctgcggcaggtcccagccaggtgccctggaacgtggctcctccttccctgaggcgctcccctgggcacgaggatgggtctcgaagcaggaggaagccgccttccctcacccgctgtccggagctgctcagccggtgcgcggagcctcccccgccgcggacaccacgatccgacccccaccctgaccccgacccagacccccaccgcccgaccccggccgtattccgttgcgtttgctccctgccagctccggggccaccactgagcacgcgctgtgagtaggcgcttcctggagcttttcctgggggtcctcagaaaaacccctgccgtccccattatagagatggggaaactgaggctcaggaaggccagagcttgcccaaaacctgcggtccgcggcgggcagggattccacgctccgagcctggccgcctccctggggcgcgtgaagggagctttccttccccgggaaaggccggggccagagacccgcactcggaccaggcgggggctgcggggccagagtgggctggggagggctgggagggcgtctggggccggctcctccaggctgggggccgccagctccgggaaggcagtcctggcctgcggatggggccgcgcgtggggcccggcggggcggcctcgggaggcgtccaggctgcgggagcgggaggagcggccgtgcgggcgccagcgccgtgggtggaggtcgccgtccctcctgaggggcagccggtgcatttgggacccgggagcagagcccgcgcctccccagcggcctccccgggggtctcaccgggtctcccgagagcggaggccccggctccgcagaaacccggggcggccgcggggaagcagcgccctcaggcgtcggaggagcccccagaaggacctcgcgcctccccgccgggctccgaccgcctgggttcggtgcgggacggcccaggccgccaggacccccaagcgcagctcagtctgcggggcacgacccagaggccagcagcagaggacggggccggggccgggagagggcggggagggcgctcctgggaggtcaaggccagggctaggctttcagggtcatggcctggcccctcatccccagggaggtgagggggctctgtgagcagaggggccccggtggagaaggcgctgctagccaggggcggggcaggagcccaggtggggacttaggggtggctgaagggaccctcaggctgcagggatagggagggaagctaggggtgtggcttgggcaggtgctgggggaccgcgggcgccctttattctgaagccgaatgtgctgccggagtccccagtgacctagaaatccatttcaagattttcaggagtttcaggtggagacaaaggccaggcccaggtgaaaatgtggcagtgacagagtatggggtgagaaccacggagagaggaagtccccgaggcagatgatgggacagagagcggggaccagaattttttaaaacgcatctgagatgcgtttggcagactcatagttgttttcctttcacggagaaagtgtgggcagaagccagctctaaagcccaggctgcccagcctgcactggcagagctgacggaaggccagggcagagccttccctccctgtcacagacatgagccctggagatctggaatgaggcagatgtgcccagggaaagctgatccgccccgacccagggccccccgggtgcccctttgagcgtggaatcgttgccaggtcatggctccctgctatcgaacaccggacatgggtcgtgtgctgcacctggcagttgcaggaccgacacccgcaatgccttaagaggtgatgactgccttccaggggcctggctggctgacactttgcatggctcctggagaagagggattgagtggagtccacgggtcatggccacgtcctgggtgctgcctctgaggcagggcccggctggggtgagaaggggctggagacaggttcctgccagttcagcctctaaccggtggtcttcatgcctaggaacccactgggggcttatgaaactgcaggtggctgagtccttgccatggggtctctccttcagcaggtctgggtggggccggagactgtaccccacaaaaggtcccaggtgaggcggatgtggcctggcgctgtgtggctctggacctagtccttgggcttgggctggcacccagggcctgggcttgagacagctgtgacgcaggcaagccatttaccccgtttgtggggacattacatcttcctagcttggaacacacaggcagccagggttgttatccacattcctcctccatgttcttctcttgagaacttttaccaggtatgtcaggagctgggctccaccagggagactcaagtggaaagccctcatccttgtcctccaggagacaggaaaacctatggttacaattccagggacaagagcgatgcatgtgaggtgtggcaaatctcactgttcaactggagaaatcagagacagcttcctggaggcagtgacacctggacaggcttctccacaggaggaagcgagtgagagaagccaactgggatggacccatcatgtagggggaacagtgcgcgcagaaccaacaaccacccccaccctaggcccagagctcacggagagagctgggcctctcggggtgactacatagttccctgctggatcttaggtcttgtccttgggcagctctgctgagacctctatgcctgttccaggctgcaccaaggttttgtgactattgacccttgactttgagttgggagttgctgtatttttactaagggatggagagacacagcccccaacccccagggagctgggctggctctcctatggctcagcccatagctccagccccagggatgtccagaggatcagaaaactccctccctcctttaaagcagctactggcagagtccgtggagctcttgggggctgggagacaggcaggaaacccacctggcaggcaggcaggagcccatgggggagggttgatctttgatcttcctctgatggcccaacgggaactgtgagcacccagccgctcactgggacatctcggtgcagggaaagggctgaagctggcgcagccacggcagcatcccctctcgtggcagtgctcctgaaacagagacgtggtctgggcagcatgctgaaaggcatttctgaatgaagcctcctactgacctagagccagcacacaccactccaggggcagagaggagagagcaggagcaggagacagtccagggcagaggcaggctctgagtccatggagaccctccctggggcaccccctgcatctgcaggggtccaagcctagcactggctctgcaaggattcagccactcatactgtgcccccccagcatggggcatctgtgggtctccctgaaggtgggcacctgggcagccttcctgaggggtcagagcatccttgcaggcatcagtgattccctctgtccctttcaccactggccatggctggagcagagcagcaccgcatggtttggctctggacagctgtgaggccccatgaggcccagcatgtctgcaggggcctctcctagccccctctctgcattctgaggcttcacttgttgaacagaaagaggtagcagaatcccaaataagagtgcaacatgtcacctaccagctccagcgcctgggggccaagtgtggactcagagcttctgtccagcagaggcccctgatgtgcagctgcaccgagacacccaggcagggcgtcacctgcaaggtcagctgcaaggctgggactggggtttgtaatcgctgttgtctcttggcctgcaggatcctcacgcgtgccgcttcggtcctgatgggcaggacgcaggtctctcactagaccagtgtttccctctgtgaggcctggagaggagccttctggccactcctgggtacaacacgaagggagaagcagacctgagttttttatttttacttatttttttttttttgagacagagtctcgctccatcgcccaggctggagtgcagtggtgcgatctcggctcactgcaagctccgcctccccggttcatgccattctcctgcctcagcctcctgagtagctgggactacaggcgcccgccaccacgcccagctaattttttgtatttttagtagagacagcgtttcaccgtgttagccaggatagtcttgatctcctgacattgtgatctgcccgcctcggcctcccaaagtgctgggattacaggtgtaagccactgcacccggccaggcctgagctttttatatacaccaactgccaaacattccacgtgaatttcctgaaacttctctttggaaagcttctgtttgtatgtataaggcaatgtgcatgccagcatgtcagttacagcaggagagagggaacaagccatgtgggaactgatggagccatgtcacatccagtgtcctctgcagccgctatggagtgccaggaggaatgaggggcaaatggtaagatctttatgacgtgagagaagccaggtgcggagcagggaacagtcaggtttaattggtgtgaagaacaggatcactgaaaaatattttctcatagataaaactctttttgtataaaagtctacagaattgcgataggaaacccataatcatggtttcaagtgggcagagaactaggctctggcgtcaggggaggaaggggaactgttcactgtcaacaccttttaggacgtttccattgggatcgaagggtggctcactctgccactttgacataagaatcacttctacctaaggcacttgaaaaatggcacaggcaagagcatcatcggatctctccttttcttcctgaagacaggagataaaaacgctcaggtgaaagatgccttccctgtaccgggcgaagaaagattcctctacagggaagcacgtcatagccaacagaattctgtacagacattaaagtaattaaagtaattcctgtcgttcttaagcctccccacacggtttacttttccacaactgcctctttgttcagcctcctgcaaaagcacataggtttcgtcacttctttgggtctttgcttccttaggagggtcctgtgtgacatcaaagtgacattaaatttgtatacatttctcctgttaatccatctgatttcaacttagttcccaggcccagccaggaacctaagaggagggaggtggatatttgcctcccctacagtatcgtgtacgtatatgactttttaaaaaagaaaatctggggccacatggcagtggctcacgcctgtcatctcagcattttgggaggctgaagtgggacgactgcttgagccgagttcaagatcagcctgggcaacatagggagattgtgtctctgcaaaaaaaaaaacccaaaaaattagccaggtgtggtggcacatgcctgtgttcccagctattcaggaggctaagatgggaggatcacttgagcccaggaggtcaccattacaatgagctatgattgcaccactgttccaacttgggcaacagagtgagaccctgtctcttaatttttttttaattaattagttacctgattaacacagttccttattggtgagggattctctactgtggtccttctgcagtcccaccccatacatgaatggcttcttttgaagcttcctcctttgtacaggtgagtatctttgtcactgtcttactctgttttgtgctgctataacagaataccacagactaggtaatttatataatgaactgaaatttactggctcatggttctggagactgggaagtccaagacagaagagctagcaactggcaagggccttcttgctgtgtcatcccatggtggaacagcaaagagagggcaagagtgtgccaaaaggggggcaaactagtccttttatgaaaaatactttgataacaaacccactcccatgataacaacattaaccctttcctgacggtagagtccttgtggcctaatcacctcttaaaggtgccacatcttaatactagtatgatggcaattacatttcaacatgggtttcagaggggaccaacattcaaaccatagcagtctcaaacactgggctggcagtggaagaggaggctgatctttaaagaatataaattttttttttttgagacggagttttgctcttgttgcctaggccagagtgcaacggtgtgatcttgggtcattgcaacctctgcctccccggttcaagcgattctcctgcctcagcctcctgagtagctgggattacaggcatgcgccaccacgcctggctaattttgtatttttagtggagatggggtttctccacgttggtcaggctggtctcagactcctgacctcaggtgatccgcctgcctcagcctcccaaagtgctgggattacaggcgtgggccaccacgcccagccagaatatgttctttaaaaacaggcacaattccatgaagtaaactcacattggaatggttaacaggtaaagtgatccagctggctgaaacaataggcattcaccggcatccaaagtacataaagatgagcactttgagactgcgccactgcactccagcctgggcgacagagtgagactctctcaccaaaaaaaaaacgtgagcactttcacctcaagagtcgctaggctcagatgctgaatgcaccctgaaggaactctaaagataccagcctctggagttttcacagccaacagcattcctaggtagactggttgagaacacggctagttggagggtaaaaagaatgacttgtgaatgctcactaggtctttgaatatgtaagtagacacgacttcaagccagttgctcagccttgaatatatcctagagtccatcaccttgggctgtgagtggcttgtgcggtcatctgtccatctctcagctgggcgagaaacttgatgtcctttctgagaggtggccctggctctgcctgggacctgctactcttctccaaagtgcattttttgtgggtgggttttcactgtgggtcctgggcaggtgagtgctggtgcccagtgttggggagcagggtagatagaggtgtggctgctacctggctgggcccggacttggcagccttccttcatggccctcagccacagcctgttccatagtttgttctcgatgtgtcagctttgtgttcccatgagaacaatgggctccttgaggacaggcattgcatcgtacctgtggtctcttccctaacgccccccagtacgcccagcatagacagcacagggtgcaagcagtcagatgagcagggctcccgttcccagcacgggacccagcccgttacctcgctgctatgtttcccacgtaaacggagcaatacccaattctaaagaactgttctgaggactaaatggaatagtgtaaaaaataaattgacatgaagtgaaggtcaattaaaatgcactagcttggccaggcgcagtgtggctcatgcctgtaatcccagcgctttgggaggccgaggagggaggatcgctggagcccaggagtttaagaccagccagacaacacagcaagatcccggctctagcaaaacattaataaaaattagccgggcgtggcggtgcccaccggtggtcccaccttctcgagaggctgaggcgggaggatcgctcgagtcctggacgtcgaggctgcaatgagccgatttcgcgccattgcgctccagcctgggcgacagcgcgagactccttctcaaatatagaattttaaaaaggccatctcgactgccgcgggggtcgcgtcctctccatccccgaccttggacgcaaccccgggcttgggtcccccacgatctagacagaaactcgttgtttctcgtgctccgcgccacccgcgtcctccggtctgtttctcccaggtgcgtcggtgaaaggcggagcgccgccaccctacacccgcgaccctgcgcccgcccgagccgcttccgggtacttccggcggccgcggggctcccggcagccgcggctcctgtttccgccgggcggcgagaacgcaggaccagcttccgggaggcgctccgcacgtttgccgtgctccgccgggaagatggggaaagtgagggggttgcgcgcccgagtgcaccaggctgccgtgaggccgaaaggggaggccgcccccggccccgcgccccctgccccggaggcgacccctccgccggcctcggccgcggggaaggtgagctggggaggcgctggccgggggctgccgcgtgggtccgagggcgggtgagctgcggggcgccgcctccgggagggttccgcgaccccggccttccctcgggctctgcgggcatttgctgcgctacagacgcgaccttcttgcttcgcgaagcgtcgtaaactccgaggctccgctctgcgctgccgtcctgggcacacggactcgcgccgctcccggggaggggagagagccaggaacctcccgctgcggtccagggttgccacgcggaccccagaggttcctgaatcgcactgagctccccggaaaggaaaggacgttcccagagttagagaagaacggagagcaaactgaagagagaccccgttccctttagcagtcggctggcctgtttctccatccccctcagccctaagcaagcacgaatctaccttttgtctttattctagacactgcatgtgagtggaattattgctttcaggatttttttttttttttggcttttgccttaaatattttgaccgatgtgtcttggtgtaggtatctgcatttattttgcgtgttcactgagcttcttgcgtgtgtaggttaatgtttttcgttacattggcaagtcttcagccattatttccttgaatatttttttctgcccctttctgtcactcctctctttcggatacttccattataaatatgtacgtcgtgcttaatggtgtcccacagtgctctgaggcgctgttcactcagtttttctcttttcttcagatggcataatctatcttaattcaagtttactgatgttctgccagcccagaggtgcttttgaacctttccagtgaaattttcattttttttgactccagaatttatttactttctttctcttctcctgttcctcctcattttaaaaaatactctttactgatgttttctgtttgatgtgagaatgtcattataccttcgtttagttctttagacacggtctcttttagtccttagaaatatttataatgcctactctgaattctttacatgtgggctgctcaaagcagtttctgttgcctggctcatgctggcaggtaggagcaggtgggccttctttgaatgtatcactttttgtggaaaattgggcattttggatagtcctgtagcaaccagggattagtatctgcttgattactttgtttattgatctggaactgaactatgtgacctctctccttgtccccttctggctgtgtgcagcctctgatgtgcccccttggttttttttttttcttcctgtttttctcttttagcctggctagttggatctgcttaagctcctcactggtcagcaattgttcttaaagcctccttggccagggggtttttgccttttaccactggatacctctggcttggaggtggctgtcagattcagcgtgttcacatttttgaccttcatttctgccctcagaggcacagccaaggactagtagcttacagagtccctctgctcactcctggtagggtgcgtccttgaacatgcgcacagcctccagactgccagggatgcgacctcctgggagttgttcctgggtcagaggggcttactgtctacccaggagccttgggcaccctgccctctgcatctgtcaccacccagagctccttcctggtcagcaacacccttaggcgtgagagccctcacacgagctgcagacaaggcgagtcccttctggcagagctatggagttcttcctttttgcagcctaccgctcctgggcaagagctccgtgtcaggacaccagagatggggcaggagcagcttcagcttctcaggtgacatctctctctactagcaggagaggggcgtgcctttagttgtcttggctcattgaaacctgtgccagcatttttttattaagctccaaaaatatgcattaatgagatataaagtgctaccatggagaatgtcccaggtacagtgggaaaagcagtcgtctgccgtataccaacatacattcatgatctggaaggctgcatgctgcaccccttgtccccacctggtccctgtttgcctgtgaggcctcagcctacctgtgctgcctcagccacctgcctgcccatctgaaggctgccctggtctccagcactgttcccccgtgagtctgatattttcccatgtaccgacttttctgtctctgccacgtaaccctccaagaccaaggacttctccctcaggtgctgtgggtgagggagaccaaggacttctccctcaggtgctgtgggtgagagcacctggggagttgcagtccagcctggcacctcttggtgccctggctgccttctacctcatctgcatcctgtctcctctgtaatgtgaaggaggccatgttttacctctaccttcaaggtttttaggttgggcctgagatttagaattacataaaacagattaacaggagaaaagcgtacccattcattgaagttttatgtgacatgggagccttataaggaaatgaagacaaggaagtgggagaactttgtgcttctttgagagggtgagaggttgaacggaggtggttgtggaaaactaaaccacatggggaggctgcaggaggggaggggttgtgttcaccaggtgtgtctgtacagagtgctcttggctcctctgatccatccctgatgataagaatgtcacttaccttctggtgtaggagggcatcttccatatgggggttttatctcctttcaggaaaaacagggagggggttaatatgccctcttggtacctgctatatttttaagtgcctttagctcaaaataattagtgacatgttttggggtggcgtattctgacccccttcagaaacctctgttgaggtcgatgctgccttccctgccaaggtcagtgaggcttgcacatgaatgggctgggcagcacgggggtcagggacgggggggttctgtctcctcacggtttggtcggcagctgacttggaggaactgaaatcttcatgcagggatgagtgtggctcagaaccagacctggcagagaggctgctgagatgactagttctgatgggatgtggtcagtctgagctgaaagagctgtcaggctgggagctgcctatccttcatctgctcagctgcaggtttcttctgtgacacaggagaatgttgtagaaagagtaagacgaaatggttgggaaggaaatttggttcttgagatactggtcctgactcctgaagaaccaggagtgaagcccgtctggtgattgaaggcagggagcaggtgggcctgggcgctgcgggtctgccctggagctctggaaccggaggcttctgctctgggaggtgagggttgtttcccccaggtcctcccgggcagagaagctggggaatccaggttcttgtcttgcatcttctcctcacctttaacgtccctctgaaaccacagagcaagtctcacacctcttcttttcgtccgtttttgttggggacattaggactgggcgttcatcaacaccaacatctttgccaggaccaagatagaccccagcgccttggtgcagaagctggagctggacgtgaggagtgtcacttccgtcaggagaggtgaggcaggctcgagtgcacggagcgtcccttccatcaggagaggtgaggcaggctcgacgggttaccatgctgatacccagcaggtctgggattgttccctcaggcacccgaggtctcagcagctttccagctaacctgtacctgacaatgtccttgagcaagggatgcccctggctgtttcttggggcgattccccagagtagattacagctgtggttttgcccctgggctgcatcatgtctccgcagctctgcaagaactgctctgcgtcctggcagccacgctgaagccacaggaacttgggctttggtgaccaacagggtttgaactgttttctccgtgtgtgctgattctttcggtctgtctgtatgtttggggcagttttgatccttttcttaaacaagtgctttatgtgttgcagaggttagctgcttatcattttgtacaaataactcttgagggtttagatcctgaagccgaagcagggtcctctcagtttcatcagatccatgcgcagcccttcccgtctcctggttgtgctccttgcagccctgcagcacacacgtcagcctggccagtgagagggtctgggaactcccactcactccagtgtccggagcttagcagggaacgccgtccccctgcacctcctactgagtctgaggtgttttagagagttcccggccaccatggtcaatgctgggagtgttgactttctggctggaggatggtgagcagtgtcacttcccagggataaatccaggaaaaagcttccttcactcatctaagggagtcggtgaggagcacaaggaatactttttacatcttgacagccttgggaagtcataggttggggagggagagggcctggctgtgggggcagagctcagggcaccagtgtgacagtgaagactgcatgtggcttcacagtcggcagagctgggagcgccaggacagggcaggagccgggtctggggcctgtagatggcccgttaagatcgtgggctctgggcctctgcccctcaccgcctggtagcctctggctggacacttgatcgctctgggcctgggctttgcatctgtcaaaggaggtaacagtatttatctcctaagttctggcagttttgagtttgagatgaggtagttggtgtgaaacgtttaaaacagtgcagtgaaggctgtggaggcgcccgctctgcatctgttgaacgaggctggtctggtgggaaggctggggacgagtgggttttgcagctgcccagaggtgggccagccctaattccttgggcacaagtcatgtgatcacgggtgctctgtgacccttagctccattgtccacaaagcggcgacagacatagctcatagatgctaagggcctcactgtgcctctagaaagatccaggtacatttaaccagtgcaggtttcctgctccttctctccaaggaggacctggtgaggtgaccaggccaggtaactccagagagaagctgtgccttccagccaggaacgcttgatgtgggtggtccgcccgagctgtgtccctggttgctgacaaggcccttaaggctgtccccaaggggatgggagtcgtgggtctcagtgacctggctctggcctgagcttctcagagctctttcacacagcagcctctttcctctgccttttcttggccctctcccttcaagcccctgtggctcatctggtccccaaggtcacctgctgcactgactgtcacgtcccctcttcccctcctaatttagggagacgtcacgctcacgacccgtcttgcctaccagggaaactcctctttagcaacatctggcctcgcagcgttcttgggctgaggtcgtgcccagcagccctgtggcctctcctttgagccatgctggatctttgtttttgtttgtttgttttttgtttgtttgtttgtttggagacagagtcttgctctgtcgccagggtggagtgcagtggcttgatcttggctcactgcaacctccgcctcctgggttcaagtgattcccctgcctcagcctcctgagtagcggggacgggacaacaggcacatgccaccacgcccagctaacgccaccacgcccggctaatttttgtatttttagtagagatggggtttcaccccgttggccgggatggtctcgatctcttgacctcagagatctgcctgtcttggcctctcaaagtgctgggattacaggtgtgagccaccacgcccggcctggtctttgtttttcgtaagctcaaacctcattaatttagagtaactggtgggagagggtagaagcttgaactttacaatgtcaaagattgatttcaaatttcagaaccatgttatcagagtagagcatagaagtgttttcttgaaataattgaacaataagttgaaaaaatttgaagattctattgtttgtgagtctgttgggtaattaatttttttcttaattcacatacccttatttgtgcataaaaatcttaaagcttgtgctgacgggactgtagcgtggcccgttctggcgctccccagccctgagctcgtgctgacagtagcgtggcccgttctggcgcttcctgcttgtgtgcaggtgtttcccatagcccgccttgaggggcacgaggatgggaattatttgagccgtgcggcagggtcagggttttgggtgttggggaggagccttggcctggggaggcacttagtgcttctggccaggagccggtggctttgtgcactgcccatggctgtgatttctgccttggtgccccagggggattcaggagaaggtgctccaaaatggtgccttggaggttgtccctgaggtgtgttccaggaggctgtcctgtgggaggggcgttctgagctcatcgccgcgggcccccattacagccctcctggagcgaggcctctggccagccgtctctggctgtggctctcagcccagggttctggtgcatattccttccaccgccctgctgtgggttttctgcactgaagagccccgggctggatgaaggggaccatgggacctcacagagggctcagacggagggacaggcctccacttcccctgccctgggatgtgaagcaccagcttggcagggtggcagggcccacagaccctcatgggtgggacctgcagacccttagaggagtagccccacaggcggaggggcttgccctggtctgggggccccagccccttttcttcaggcctccgaggtatccaggcgcctcagtggggtcctttgcatcttggctgctcctcaccatgttcctccctctctccaggaacagttctgtttttttggtgtggtctcctcagctcctgattggctggtgccctgcgtccctacccccaccccaccccgggtttgtgctggggcctgagtgcccatgtcatgcagatactgcatcctgtgacttggccgccacccttcaatgacccgcctggctatggaggtgaggtggcggcctgtgggtgcctgtctgcctggcttagtgcaacaccgccttcccaagatgtgtctcatcgtccgtgccctgcctgagtcaggaatagcactgcatgctgcgtctctggccaaggagctgggtggcccaggggaggggtctaggctgtggcccatcacctggtggacacccgtgtgcccatctgcacccctcctcccccactctagccctgggaagtggtggggcttgttagtccctgtgactgacaagttcgtggcatcgttcctatcctgtgactgacaagttcatggcatcgttcctatcctgtgactgacaagttcatggcatcgttcctatgttttttttcaagcccttcggatcccagctcgccaggaagccacatctgaccccctgttcccttcctgtgccctggagcctgccttacccttacgggcatcctgggagggaccctctgagctctgcagcctcctgctacgggaggaggagggcatgggtgcagggctgaggctggcctagagtcccctccccgccccagctctctaagaccccctgcacctccccagcaggactcagctttgcctgtgggccgggttgtgcatgcaggggctttgcggcagcctgtggaccccatgtcggggctacagctcctccatgtccgctctgggggtggcgagggacctgtggcagagccggggtgagcacccgtctcctgagcctcccccaacgcagtgccacctgctgtgcgtgctgtgtggccagctctagctggcttgtgcaataccagagcctggcagccggccgggtgtccagtggtggctgatcctccagccttgggcacggctccaatccttggcatcggacatccggggagctggtcatgcagcatcgggcgatcgggcatccggggaggtggtcgtggagcatcgggcggtccgggaatctggtcgtggagcatcgggcggtccggggagctggtcgtgaagcatcgggcggtccggggagctggtcgtggagcatcgggcggtccggggagctggtcgtggagcatcgggcgtccggggagctggtcgtggagcatcgggcgtccggggagctggtcatgcagcatcgggcggtccggggagctggtcgtggagcaccgggcgtctggggagctggtcatggagcacgcttagaattggatttctagttctgtgttccttcataccagaaaacgagcccacctgttttcagacaggcacttgggactcaagctcagagacacaggcagggtggggcaaggcctggtatggactcagagccgggtggggctgggggcccctggagcagaggatgttgggaggcctgtcaccattgctggagagggagctcacagcatggtggacggcttgggggcggtgggggcatgagaggcgccggtggtggtacaggattttgggggtgttgcttttctggccagatacctgtggccggtggcacctttgcttgagttttgtccaggcccactgggctcatttcacctacttggcctggcaggctgagctcagctcatgctactggcctggatctcatgcctccaagggagactggagtcaggcgtggagcggtgaagtgtgtgtgtgagcaagtgtggggtccggccattgcaggccagcgccaagccaccctcagcccccgccttggcttcctcccagagcttgttgatgcccaaggtccagagggggccaaggtggcagggcctgagtgtgtgcacacccggccgggctctgacagcacctgggctcagccccaacccccctttgagattggagtgggcgttggaagcagggagaggccaggcagcaggagcaggcatctctgagtctgcaagggtaagagtgcagagaggccagggtcccgagccccgacttggctgctgcttgctcccgctcctgctggctctgtggagcatgcagccctggctccccctcgcacggtttgtggccttgcccgggggctgctcctgatcagggagtggattgtgggccctgggccctgggcccggctgtcaggagtgtcgggcctggcagtcacaccgatgtggggtggatcctagggatgcagcccaggcggccctgcaccatagcctcctccagaggaacccagcaccctcggccgggtggacacagggaccacactgctgtccgggtccccaaagcgcggccccagctccgcctaccccccagaaccctctgtgcagcagcagcaggccagagcgcaccatggagccaggctctgaagccacagaggcctactcttagacgccgggcacagggcacccaccgccgccattgctgctccggcagccactcctgccgcttctgcctgcgccttccggctgtgtacgacctgctgctgctgtcagtggaacacgtctgcgtctgcaggcgtgttggactgggtgacgaggccaccaggctgtggtgcaaggacatcccaagctcctgcacccagcccttgggcagggctggctctcccggtcagcacagagcgctgcccaggtgattgtacctgcttagaccccactccacccccaggcacctgcggtggagggacctgcggtggagggcgcgaccttggcttcctggccgtccctctgccctggtgatctggccagcagagggcagcagagctgtgtccttgtcaggtcagcccaggtgtgggacagtcccgggatagagacgcaggctctccctcctgccttgcacagcggagacttgggaagtcccagctcctcatcagacagtacagactctggggttacagggttgtcttcagggattttttttttttttaagataactggaaaatggcagaaaatgagccttgccccaccctgcctgtgtctctgggcttgagtcccaggtgcctgcctgaaaacagaatgagctcattttctgctattttccagtatctcaaaaaaaaaaaatcccttttttaagacctttttttacagttgtgaagtcaagggtatgacaggaaaccatgcagaatgtacttgttgcttatatctactcccaagttaaaataagaacaaactgacggggaggttacatggagatggctctgtggaagcgaggcttggggtcagatggcctcggcttggccgcagctccctgtgcgtcacctgccttggctgcgtggtgcggcggctgggagtggtgcgccttcttacctgcgctcctgcagagagtgtggccgtgccagccggtatgttgggagcccaatgacttgtttcttaagccaggcatccttgtgagccacatgttgttgagacgctagaccaggggtcggaggtgtggcctatgccagtccggctgggagcgtggccctgttggtggcgcttctcaggcccatggtcacgcagtcacatggtgccatgctgaggcatttgacttggaccagacatagtgctgtttcctcccatcttagtgggagtcaggagccagccagggcctctggggttctagcctcctgcacctccttgccggcgtcctcagggtttctgcgatcagctccttcatctgcgaaaggggggtgtcggggggctgctgtagaactgctgtgggtttatcctcatagaactttgagcacagagactggcccaggcgggtgtgggctgcacctgtgcctgaggatcacggtgactccacctggtccctgtcctggagcacgtggcggcgactgggtacacgtgtcgtgggcacagtgcagcaggctaagccttcatcggattaaagtcgccggtttgatttaaaggccttaaaaatggtttaaacacacagcagcagcagaacacacaggagaagattcctctgggcttggccagcctcttctgtgcctgtgtctcatggcctggctcctgttcactcaggttgagatgaaaccgtggctgctgccatactgggcgcagaggaggctcccatctcctggtggcgctgaagcccacagccatccaagggaccaacatcttgcagcatcgcgcagggaggtaggagagaggcagggaaagtgggcatggatggccctggcttgctgcacagcctgggaggaagcagggggacaggctgtggatgtggcccttgccggtcctgttcaagtcccagctctaccatctggatccaggggctgagtcctcagcgcacggggcgaacggccgcgtctttgcccaccgtgcctcactcactgtcatgcctgtggctgagacttgaaggttagggatcaacttttacctaaaattacttctgtagaaaataacatttcatgattgagaaagcagcgcgtatgcacacattgcagaatagacaaatacgcaacattgggagataaaagccaggccctgcccccggagccgcccgagcgcgctgtgtgggcaccatctctcactgcccgagggcactgtgtgggcaccatctctcgcctacaggtgttctcgcccaggcctgctgcacgtgccaatcactaaccggggcggggcatctcaggaaaggcccttagctagcagtgtcttcaggagcccttgctgctctttgtccgagcagggttcgcccgtcgtgtgtgggtttatcctcatagaactttgagcacagagactggcccaggcgggtgtgggctgcacctgtgcctgaggatcacggtgactccacctggtccctgtcctggagcacgtggcggcgactgggtacacgtgtcgtgggcacagtgcagcaggctaagccttcatcggattaaagtcgccggtttgatttaaaggccttaaaaatggtttaaacacacagcagcagcagaacacacaggagaagattcctctgggcttggccagcctcttctgtgcctgtgtctcatggcctggctcctgttcactcaggttcactcaggcctttgtgggccgtgcaagtctggatctcaccggcttgccgaggtccctgggccgctgtcttgggcttgcgctgctcgcccccgggaagctcagccactgcctttttctatttgccagacagcaatcggcagcttccctggccactcagggagtgactcctcctcatcagagctgtctgctgtcagggctgatgtttaagttgtttctggaactttcacatcagagtgtgtggcctgatcaccttgggcctggcctggggattcccggggccgccttccatcaccagaaggttggccccagggccctccttctcccctgcaggtctggccccagctgcttcaggaccgccctcccatgggggatgctgtgcccagcagaggtcttttggccgagtggacagttggggttatgtggccccacgcccagcagaggtcttttggctgggtggacagttggggttgtgtggccccacgggaccctccctcgtttggggtgctgctatgtgggtgtccgtgtcatgtgctccgggcgcccccctgcctaggagacggcggggcagtgtctgagcatgtgggttgctatttctgaacctggcacttggagctcggtggctggagctatttaaggttcttgacatgttcggttggtggggcctggctggcagcatcctgctgaggccatctgcacgtcactgtcctcatcgacagctggggtgggagggcagctgagtgttttcaaatggaaacttaggggtgagcagggaagggctggggccccaggtgccactgtattctgggtgtggcactcattctgacttgcaggtgccatcctgagactaggaggtccccagggccctgcctctggcagcctcccccttggcatcccacctggtgtgttttccagaccccgcctggcaaggcccaggccgagcctgtgcagcaggctctcctcattcactcctcagacactactcctcatgggaggtggcagcgagtgccccccggctacagggctatcccttcctctgtgggcgcgtggccggcctgtcatgttcaggggccctgggcactgtggttttctgatgtgtgcttgtctgaggtgtaggcaggtcgtggaggctgtcttgcgaggttccctaggtggggcccccagactagctgaacccaccaagagctgcgagtggctgtacctcccagagcaggacgcctctaggtgagcagcacagccactccctcgggcaccatccccggcggtggggccctgcgtccgggcctcgggagcctgtcctgcaccatccccggcggtggggccctgcatccgggcctcgggagcctgtcctgcaccatccccggcggtggggccctgcatccgggcctcgggagcctgtcctgtgttgacttaggactgaagcagttctctggggcttcttcctttccaggtgggatggggtagtttgggcagatgctgaggacacaggccaggtgtggctcaggaggccaggagtgccctctggccccgcagcctgggttcctcagtgcagtagcgtgaccttggcgctctgcattcagcgtccctgggtcgtgccaccccccggggagctcttggccatgactgctcttccctgcggtgctgctggtactttcctcgctgcaaacctcggccgcaccccaaggccttgctgaagccctcagtcccagtagctgttgatcctttggcattttctgcatcatgaccatgccatgtatggggacggcggtggttctgtctcttgcttctccattcttaggcctttgacgtgtttctcttgccttgttaccctggctgggagctcacaggacagcaagaagccacgctgctcccggggcacatgctacatccaccattggctgcactgcccttggggttctggagggtccttgtggggtgagctaacactgggggtgggtgtggagtgtgccaggagcctgctgctgtgtctgtggagagaatcctgtggggtttggagtccacgtttcttgtttgtatcagctccatgacacttgcaaggccagatcccgtggactctgcgtcttctggccggtgggttgctgaggggagcagaggggccgagcgttgtgtgggtgccgtgcacaggctgtctccagtgctcctgggtacccttctctcaggggccccgtctcccaggccaccttctctcgggaggaatgtcgaacccctggctggggtggatggtgttggctggagggtgggggctgcccgatgcagcactttgggagctccggccgtcggcaggtttgtctgtggttttgaatgtccaccctcaggtcctgggagaagggagtcgaggtgagccgtttgcctttcctcaggactgcggaggtgggcacagggcccagtggtggaaacgtcctccggccctgcagcctgggctcctcagcacagtagcgtcaccttggtgctctgcgtctcagtgtccctgggtagtgccaccccccaggcgctcttggctgtgactgctcttctctgcggtgctgctggtactttcctcgccacaaacctcggcggggggtgtctgccgatgcggaccctggatggcggtgcctggtttgttccagttttgttccaggacactgtctttgaccaggacaatttgttaccaatttttaaaaaggtctttgggtttttctttaaaatggacacctaatgacaaacatgtagtataaagaaggaagaggccggggacggtggctcacacctgcagtcccagcactttgggaggcagaggcaggtggatcacttgaggtcaggagtttgagaccaggctggccaacatcatgaaagaccccgtctctactaaaaatacaaaaattagctgggtgtggtggtgtgtgcctgtaattccagctgctccggaggctgaggcaggagaatggcttgaacccagaaggcagagattgcaagatcgtgccactgcgctccagcctgggcgacagagtgggactttgtctcaaaaaaaaaaaaaaagaagtaagaaagcttggaaaacagagagagacaggggccctcccgcttccccactcctagtcccctgtgctcctgccgcttctccccgctgccgcggtgctgggcacgtgcaccaccccctcacatgctcgcccaccagcgctccgagggaaagctgtgctttctccagcttattcctgcagcactgcctctacgtgaagttgtgcaaagtggcacatgatagataccatgaaaaactcaatgccaactaccgttaagtgacagcctccccactgcagacttggtctgtctgctcctttctttttttttgtgagtcagtgtcttgctctgtcacccaggctggagtgcagtggtacaatctggcctcactgcagcttcgacctcctgggctcacgcaatcttccctcccactttggcctcctgagcagctgggaccacaggcacgtgctgctgctcccggccccctcttttctttacaagtgtgtgtctgcccctgctgcttccctgggctgcgttctaaggcagccttacatcacggctgctgaagttttgttgtccgatgcacccagctctatagggagtgtgggccatccttgaaaacggagtaaagacatttgtagatcaaaccacagcagtggagttgctgatccagtctgatgaacgtctgatacttcacaggcgttaccaggttgcctactgcagacaccgccgggagcagcacccaagtcggcctccgcctgcggcctgtacctttggaggatatggacgaggtgtctgctgatgcggacgccagcctgcggtgcctgctttgtaaaatgcgcggcttttcatcagcaaggctacattcagccttcatcgctgtgagctgcctatatgtgccttttcctgtttttcttttcggctgttgattggtttgaaaaagctatgtaggaaggaagcaatctcttgttaactgcagctgtctccccctcgttggtagttcttttgaatttgttcatgttatttttttctctgcggaggtttaaagtttctctgtagcaaattcggtgttttctgtgtcttttgtggcccctttgtgtcctctgcagtggttttgtagtagtgcctttttaatgtatttaatccatcaggactttatttttgtgtatagagtgagacggatgattcccacttcatttttccccaaacggcctgtcccacgatgcatttcagcttgcattcacccagaaggcgtggcgagaagaacctcggcaccacgagatgctgctggcatgtgccgcttcagctggtgacctgggtggtgttggcagcatctgagtggctctgtaggccgcagcatctcccggcacccgagcccgagatgaagcagcacgtgccagcagcatcgcgtagtgtgttctgtcctgagcctcatgcagatctttgtggagtgagaatcaaggcttgttgatggcgtgcacggaaaagccggtctcatgctgattttccttagggtccatcagaacacgtgccccgtgaaccgtgtcaccccacggcccaactctggtgagcctggttctgtgtctgctgacctggtgagggctggggaccaggtgagttgcctgcggcacaggcgtgctgtgtagctgccatgtgtggcttcctccactgaggctggtttaccgcgtctgttcccggggcccctttgttagagcgcaagagcccaggcagcaccgtggcagctgggaaggctgtggttctggcgaggcggttgccttgcccagtgtacctggaattgcagctccagagcacgggccctggctcctgcgcggcagcgtctcaccttcccttttcttgtcagggtttttaggcagcctgtacctgcgtgcacccatccctctctctgtgcggggccattcagctcatgctgcaggtttttgccgggccggccggcgttccagggaccagagccacccccagagctctgtgatgagtcagctcagggcaggtttctagtcactccccaagggcagggctgaggcggggtcttccagagtcaagggttagaggggctgttccttgaacggcccttgagtcctcctcagagtgcctcccactgggccagaggggctgtcccacacggtcagtccccacacgctgctcgtgagcccggtgcctctatgcagatcgctccgtggcagctgcatcctgggctcctgaagactcaggcaagggcacggcttctcctcatcctcctcctcttcatctccaccatccatctgccctgtgccttgcagtccagctcagatacaggcgctgtggcagccaggagcaccctggataccaccgggtcccaggacccagatcgcaggagccacctcatgccctgcggccttgtctttcaccctttgggcttgttcactgccagtagcaacaggtggccccagagggttccaccgagtgtgagggggagtggatggcacctgcagcatgttcccccacagggaggcctgggctctgtcttgggggggtcctgtctcggttttgtggggaatgagggtatgagcacctcgtctagccttgcctcagccactggctggggttctgtgaggttcagtttaatggggacttgcccgtctcctgacacctttgagctgtggactgagcgggccagaaggagtggcagtgtgtgagccgcccgtgcagcaggtggcctaggatgtgaagcagacagggcacagaggaagaagcctgtctgcctagagcgggaagccgaggtcgcagccgcctctgcccttctgagtgtgcacccttctgtagcctcagctcggctggccggcgattgtatgaagtcgtttttactgtcagctctggcttggtattcctggtgcccactcggacttcaggccctgtgtgaggagctcgggctcggcggatgacctgcctcaggtgtggcccctgctgccgtcactttgtcactaatcagacgtgtttggtgaccttcccctccccatagccactggggctgtagtgctggtgctgctgggatctgggtttggggcgaggcccaggacagtagcagctcccgacacccttgcttgaggcccagcatctgcactcccagcccggccctcctccaagctggcatttctgctgcacccacgggacgctcctgtgcttccgcagcaccggcgagagctgtggtgtgctggccttgtcgtaggtaagtttagaaaccggagcagctcgagcggacttcacactgtccccaccacagggtggggtgcgcccacctgccctgtccatgtggccttgggcctgcgggggagagggaatcaggacccacagggcgagccccctccgtagcccgcggcaccgactggatctcagtgaacacccgtcagcccatccagaggctagaagggggagcaggcgtgaacctgtgccggagcacttcagcaagggcgccttgggcccggaaagcggcgggagctgggggtcgtggggccgccgccagcagttccaggcggcctctgctccagctgcagcattccaagccctctcctcctgcaggagcagcgtgtttggttcctgttgtcctggtgccatggcaatggggctggggagctccctggggccagagccgggaaggatcactgtgctgtgttcctgacctggcctgcgcccaggcctcgttttcttcattccaacacaacacaggtcactgttcgggtcagtttccactggtcttagattcatttttcttttgaaacaatttcaaaactacagaaaagctgcaaaatcagcccctcccctttgtggtcgggagggagaggttgggatgctatggaggaaagtaggtcaacccaggcacaccaggaagctgtgggaggggattaaatcctgcgggagccctgggccttggaggtttcacaccggctcctgaagtgaagtctgaaatgcagagcgcagcgactgcctttctccaggcagggcttgcttctgctttgtttttcattagacatggtggatttgttggacaagccaggaaggtctgcatgaattaaaagagatactgggagatgtgttctggggagaatgcagccgaggctgaaccgtctcgggaaatcagttaaggccgaggaaatgggggtgcccttgagtccactctgtttcagagcaaactggagtcagagacgcagcacccagtgccctctccacctgtccccacctgcacggccctgcaggctcatcccacccctgcccctgtccccccagcaaatgagcctcctttccccgcccaccgggcaggtggctgggctccgcgtggaccaagcacaggggcacctgtggagttcacttttggaggctccctgagagggccgctttgtggggtccagggatgaagcctctggtcaccgagcacattgtcgggcctggcagggggcagggagcacgtacgtcgctgggcctgacgtgaccacacaggatcttggggatgtccccctaagggcctctgtcctgttcgtggcccccttcatgagccgtcgggcattcctgcatggcttcactgcaatgactgccctgacagtcattcggggcatgagtggggaggaggcctccttgttgggacacctgctttccggggcaggctggggtgagtggccaggccatcactgcggggggacgctgctgagagagcctcctgaggccgggccgaggcatgctgcaggtgcccctggtgctgtccagagccgggagtctgagaggctggcacaggccagaccagttgcagtgactgtggcagctctgcagtcaggacccgccccagcccattctcaggtcatgggagtgccacctggacacgttttgctcactcccgtgttctctttcctcaggtgcagaggccaagaccgttttgcccaagaaggagaaaatgaagctgaggcgtgagcaatggttgcagagtaagtccatgcctgcgtcttgaggcagctgccggcccaagtcccatcccgtgggccctcctattcctacagcctcacatctggccttctacatcagccacactccccgaggagtgcccaaggggatcacccaagacacttcagaggctgctgtgggggccgaaggacagtggaggcacagagaggttggccatgaagacttggcagcatggccaagctggtctggcctgttgtggatggcactgccaccccgtccgtgtgggcacctgcagagctgggctgcctccctttggaggacggccttgggaagctgctgctctcggctccttgtttgtaaaaattacctatttttgttccccaccgtgaaattttttattgtggaagtaacctgtgctcgtggagtttttatggttcagaagtgcctgcagtggtatgtgaaatccttccaggccttgcccgcggtgaaaacagtgtctgcgcatagcggcgtgggtgtgggcagggcccctggtgtccccagaccctttcaggcctgtggctccctcttttctgaggtcagccttgccacgtgctcccagctgcacgtctccgcaggctgaaagccacacttcccactcaggttgttttggagtatctccttatttttcgtgatgctggatatttgccagtgtttttctaagattgtttctcgtcaaaattattttgtatttttcggttatctttttagtgtgattctgctgactttgtgaaattaatttggaatattttcttttttatgttatctgctttattttttccttggaggttttaaagaaaatgtatgtttttcagaggtaggacctagaaaactttgtcagtttcttttgtgattattagttttatggtttctatccctttttggatatttcttagggaaatgattcattcctccattttctttttcacagttcctagcatagctgtgaaagtggatttggacgggctactggactgtggccatttggaccctgattttctaggctgtaattctttgatgatgtgtaaattttattccatggcacttggtcctttttttttgttttttcacaacttgagtcaattttggccactcataaaatgatcgaatttgtctgaggatggtgtctcatgcctgtaatcccagcactttggaaggttgagatggaaggatcacctacgcccaggagtttcagactagcctgggcaatatagcgagaccttgtctctacaaaaaatgtaaaaattagtcagattaggtggtgtatgcctctgagcctctagtcctagcgacttaggaggctgaggtaggaagatcgcttcaacccaggagtttgaggctgcagtgaaccgtaattgcactagtgcactccagcctgggtgacagagtgggtccttgtctctaaataatgttaatgatcaaatttagtcagatctcaatcttcatatgttagttgccttcttattaaatattctgttttctttatcgttctttatttgtatctccaccttcatttctgattaaattaagaagttttgtctcttccatttaataattaatgtatttaataaccaattctactcttttgtcttcaaaattatttgtttttattttgatcactcccgttttagctttctttgggtttcagttactctgcttatctgtttgtatatgttttgttcaggagtgaaaggctgtaagttatctctaaatacagctttagctacatttcccaagttacttttactttgtattttattatgaaaaattttatttaggaaagtgggaagaattttatagggaataccctgtacccaccacacagattttacaatctttattacataaccgttcatctagcagtttctgtccatctaccaacatgggtttttaaaaatgcgtttcaaagtaaatggcagacatcagtacactccaccccaaataattctgctagagttcatggttctttttttttctttttcttttgaagattgtatttacataaaatgaaatgcaaatctaaagtgtgccattcaatgattgctgacaaatgttgtagacacctgtgcagctgaaatcctgttcaggttatggaccatcaccaccattccccgacagtcacgcacccccccagtcaattacctctcccactggccccagaggtaacaactgctgtgtcaccctttgtcgtccacagttgagcttttcttgccttagactctgtataaatggaatcatgtaggatgcactctttctgcatctggctgcttttgctcagcgtaatggttttgaaacccatccaggctgcatgtagcagcagtccatgccttttgattgctgagaagtatttcattgtatgaatacaccatttgttactcactttcctgctgatgggcacctgggcttttttccatttttagctactgtgaataaggctgctctgaacattctttacaagtctttttgtggacatgttttcgtttctcttgggtaagtgctgaggaatggaatgctgggtcatagggtaggtgtatgtttagttttataagcagctgccagacgcttttctagagtggttgtacactcacactcccaccagagcctgtgagagttctcctggccctcagctttgccaacacatggcctgccgtctcctcagcctcggccgtctggtaatcatgaaatggtatctcacggtggtactcatttccgttgccaccaaaagagcatttacatgtgcttactgtccatttgtgtttcagcgtcagtgaaattcatttttcatgaggctttttgtctttttattattgagctctaagagttctttgtcctagagtccagtctttggttggatatgtgttttacagatgtttttcccagactgtgacttgcctgttcattttctttctttttttttttttttgagatagagtcttgctctgtcgccaggctggagtgcagtggtgcgatcttggctcactgcaagcaacacctcctgggttcaagcgattcttctgcctcagccttctgagtagccgggactacaggcacccgccaccgtgcccggctaatttttttgtatttttagtagagatggggtttcaccgtgttagcaggatggtctcgatctcttgacctcgtgatccgcccgccttggcctcccaaagtgctcggattacaggcgtgagaactttttttttttttttaaataaacgagagtttaattttgagaagtttaatttatattagttattgtgtgtgtgtatatgtatgtgtgtgtgtcctatttaagaaaactttgcctaatcccaagtcatgaagatattattcctgttttcttctaaaaactttatagtttgagctttcatattggttttttttttctatcttgaattgtttgtctatgtggtgttagtggttaagttccttttttccccctaatatggatattcagctgttccagcaccatttgttataagtacttttctttccttattggattgttttgttgcctttgtgaaaaatcagaaagtctcataagtgtggatctgtttctaggctgtcttctgttccattgatctatttgttgtaccttagcaaaaaccagactgtcttgattaccatagctttaggattaatctggaagtcagataacataagtcctttttgttggttcgtctgtcttgaggttgttttggatattctaagtccttggcatttccatataaattatcattagcttgtctatttctttaaaaacaacaacaaaaacctagtggggttatgattgggatttcattgaatctatagatcagttcagaattaccatcttagcaaagcagatcttcaaattcatgaacatagtatatctcaccatttaaatttcatcatcaatgttattcagttttagtgtagagatcttacatcttataataagcttattgctaagtattttatagttttttatgctgtcataaatgcagttttttctcagctctctgctagtatgttaaaatacaattggttttttaaaatactaatcttgtatcctatgaatttactaatatcatgcattaggtctggtagtcattttgtagattccttaggatctttagaaatgcatgttttctgtatgtgtggattttttccctcaatttgctttttttccccaatatgtgttgaaatttcccctgtggatctgcacgcgccaccccaccttgcctttatgaggacaagcttgcaaagtttgtccttgctgttcctcccgttgcagggccctcccactcctggaggcctcccccggtcactctccatcccttgctttgctttgttttgtccacatacctccccagtgcccaggtagcgcctctatgctccaccacacagcctgtgccccagccgtgccgtggacagtggctccccatgccctgtgggcgggagggtgggtagttggaaccacacacatgtcccacttgactttcccaaccctcagttgtcctccaaggcggctgggccagttcacacccacccatcagctccctccgtcctcgaacactcgatattatgaaacatttaaaaatttgccagtctatgaggtgcaacatttccttgatttctaatccagtcgagtggctcctgctgtattttttggcctttgattcctctttgtttttagtatttaattcatacatactgatttttaggaacagtgtgagagggactctgactctttccccaggaggaccccagtttatctaacctcacgtgtcatgctcacactttgcctggtctgccctgcgtccactgagtgttcatcagcacttttgccacgctgttaatttctgttattttataatttgctttaatatccgatagccctactttcttgttgcttgttctttgtaaaaaatgtttttactattcttatgcatttagttgtttttaaaacataaagtttagaattagctgcacaggtttgactaaaaatcccgttgaaattttagctgaggcagcatccgatttttccggagtaactgacagagaagaactgcactctcccgttggttctcctggctgcttggaagctggtgtttgtgtgggacctcccctaggtgctgcagatgagagcagtgctgagtgttcccaggccgtgggtcccgccccgccactgcctcgctccctccctccccctcagaattgagtgggccgggtgggattgtcgatattgtggtcatcttttccttgctcggatttatcattgagtgtctaatgttttgccctgaaatgtgatactcactgtgggtttctagcagctcatctgtcaaggagcttccttccgtttgtggtttcattgtaatttttctcatgcgtgggcagtgaattgtgcagaatcctctgcacactggtggtggtgaccataggctttcttgcctcttgagtggccactgtggagggtcaccctgaggcatttcccgggagaaccatccttgcatgcctggggctcaccctgcttgggcacaaggtatccttcttttgaaaggcttctggctttggcttgctgaggtgcgggcctttgtgtctgtcctcacgggaaccacatgcctctgctttgcttttcctggcctgggtctgcagcctgtgaaggagccatctggcctggcccgcccctccctaccccagcttccagggtgccctggctctcttttaatgaggtgccgagtaacgtgtctaccacagtccaggcagggtggagtaagcgctggattcttaccttataaacccccgtgattcccaaggctgtggagagctggtgtacaccttccaagctctcaacctgcactgggggctgaggacccagaggaagggtggtctttgtcccaggttcttgtcagtgatttggagccaggtaaacacaccctgctacagggacccagggcagggtggcatcccctgatttcgggttggtcagggtgggcccttcacaccttgttctgcgagccacctgccctgggggctgagaggggcgccgctgtcccagacagcgggattggagaggagctggctgttgtcacctctggaaacctgggcattccccccagggggcacaggtctgccatgcccgggcctgtgtcacgagctggcagtgtttgagctgcaggcctgtcccggtgggttgccctgaagagagcaggccgtccgcgctccacagcctccaggagccacgtgcagtgagcagcatgtccgagcatgtgttctcttagcagttttgagataaatacatttttaaattaaatcaaatcccaaggccataccccttctgtccagaccctgcccaaatcccttctctagcgtggaggcctcagccctacctgccaccccccatggccccaagccctcaggtctgtcctggggcttctccccttccctctggggagccctctccctcctgggaacaaagctgagcctcccaggctgtgacttgccatcttaagttgagggccccttttcctcattcccctctgtcccctctgctcggtggctgtgtgcactcccctacgcgtgctccggccacagttgccagcgtccctttgcaggagaaatcctcagtggctgcagttccacctcattgtcagccctgcgattaaaaagcgcagctctgtcattaaggggaagaaaataactcaagcctgcccgccctgcaggttcccaggggcggaatgggggtgacagcgggaaggagagaggcagcagggccgggcaccctgccaggtctctcgtgggccagaggctctgggcctgggctcctcctctgcctcttgtttgcctctaacgtcgtttctccttccttagaaatcgaagccataaaactggctgagcagaagcacagggaggagcggaggcggagggccacggtggtggtgggggacctgcaccctctcagggatgccctgcccgagctgctggggctcgaggctggcagccggcgccaagcccgcaggtgagtgtccgggaggggtggccctttccgagctgtggggctgacccgggtccagaggtggagggatatgagtgggagccacgggccacggtgcttcctgagcctgcagaggccgagagctggggctccagccggtgctccgcacaggtaccctgttctcagggcgtgagctcgtgaggcccgtgggggctgtgggggacgtttcgggggcacccaggcccacccttgtgaggagcctggtggctctgctgatgccgagctccctcatgtgcccctcccccgacattgaccacagctcctgccgggtcccactgggggtccccccaactcactgttctgccacagcctccaccccacagagaccctgctgtgctcagctgaggcccctgagcatccaccatgctcttctcgtgcctctgacaggggctgcagtctcccctcctgagtggacctttccctgatgcccacctaacactgcacaccctgtcctgcccctcactctgtcgcacagagggtggcccgtgaggacggctcaggcctgctgtcgggtgtggtgagcgtgtgggacccactcatgcagggccctgggacacacatcccagagcttgtcctcatggggcgggagctgcctcgtgcgtcctccccaggagggacggggcctgatgtgagtgcggttgctctcccgagctgtacctacctgtgtgggaagcacatgcctcccagcctcaccacgggtctggatgtggtttgttcttcaggaaagaggcaggcccctgccccacccttggctgctggcatcacagcgcccctcccccgccccctgctgagagctggggtggtgggttctgggcccttagtgcatgagtggccaagccagcgggcctgggcctgggcctggaccccagtggggcccctccacccccctgccctgggcaaggcctggtcccgagcatgagccctcctcctgacgcactgaggtgctccctccagaaccccatcacccagtgacacaaccccgccacccagtgacgcaacccccagtgacacaaccctgccacccggtgacgcaacccccagtgacacaacccccagtgacgcaaccccgccacccaatgaagataccaccacccggtgacgcaaccccaccacccattgagccatttgccagtggcaggttccatgtgccctgacaatgtggacagtgttccatgtgccagcctgctgtggtgtgtgcaccccaggacggctcaaccaggagggcagcggctgcatgaccctccctgtcacctcgcaggggatgcagcctgctgataagctgctgcctgtggcgcccgtctcccaggagcttggctttcaggctctttgtgcctgggtcacatgcacgtgaaaggagagcagcctctgcccttcccctgtggctggaaggcaccacccaggtgtgggtgctgaggctctgggctcaggcgggggctgtgtagccacagcccagctttcagggctggaaagaggccggaccactctgttctgtctcagcttctgggccttcctcattcatttgtgtcatctctgtgctttttttttttttttttggagacggagccttgctctgtcccccaggctggagtgcagtggcacgatcttggctcactgcaagctccgcctcctgggttcacaccattctcctgcctcagcctcccaagtaggtgggactacaggcgcccgccaccatacctggctaattttttgtatttttagcggagacggggtttcaccgtgttagccaggatggtctagatctcctgacctcgtgatccagccgcctcggcctcccaaagtgctgggattacaggcgtgagccaccgcgcctggcctaattttgctgtttaaaaaataattttctttctcctactaactttccatctgggcagaaagcaggggctgtgtgcagtgtcaaacctggggtccatcctttcatggcccagctgcccaggctcgagggtggcaggtcacgcgctgcaggcccaggcagctccaggctggcatcccgcggcggaggcaccagagcactgggtccagaataggagcggccgcccggagtggcgatgtgatgaccgaacattcctggttcttggacaaaaatgtgaccctggtcaagtatcctttccctgttttcagttttctcatctgaaaaatgtgcttggcgctcccagaagggagagggctgtatcaacacccagcccccaggccgaggaggatgtgcccctgcctccctgcggggctctgggccgggaaggcacatctgctctcagccctgagagcctcctgtcgctgggagtccccgtccctcctcagatgtggctcaggcagcagtgcctcctgaccctgggggagctcttggaatcagccctattttagacaggctttagattcgtagaaaaatggcaaagatggtgccaagagctccatgcagctcccccgtccccgcatgctgttgctctgacatgagtgtggtacgttcgtcacatggaaggaaccagtatcaacagagaaatagtgagcgttaagtaattaatagttaactaaagcccataccttaggtttccttcatttttccctaacggactctttctgcctcaggatccgtacaggatcccacgtgacattcagatgtcatggctccctcggcccgtcttggctgtgagtttctcagactcctcttggttttaatgaccttgactgttctgaggaagctgcctgtcagctgaagatctgtctgatgtttttctaatgggtacaggaagggactgggtttggggaggaagcccccagaggcgaagtgccactgtcactccactgtattgggcacaccctgtcacctgactcaccgtgaggctgagctggcccctgctgggttgagaccccccctccatgctgtccgctttgggaggaagtcgctctgcagccctggcctcggggtgggggttgtgctctacctcctggaagacacagcagtgacagagactgtttggaatcctgctgggaaaggagctttgtctcttctccccgtgtatgtgtcgctcatgcgccggtgttggtctggacagatggatgtttagtttacacacagcgttacttgattttggtgccgaaactgttccagcattggccgctgggagttcttgcagttgcccccagctccctttggccccattgacgtgggggtcgtatttttagctctttcccactgccgagcaccaacaggtaacccaggcgcatcttggacatctcctgccagtcctgctgtttctctagggagccctggcccctgtattgcaggaggtgtgagaccctgagatctggggctcggtgcgcctgtcccaggatctggggtttggcgtgcctgggcggcgggccgtgtctctgggaactgcatcttggtcccggcaggcaggtctgccccactgaccaccactcttggactctgatgtgctttgggcttgaggggtcagcaggcgagcaccagtggcctgggaggctggagggtggacagcctctccctcccagcctggagctctgtctctcacttctccccttcccacctagtggggagaacatatggcttgggctggcagagctgtccttgtggaacccaagcattgggtccttgccccacggcccctcccaaccctcagtcccctcagtcccctcccaacccagctccctcaatcccctgtcctggcgccctgccctgagggcctcatgcccctggggtgcaggatgcagagctggaatctcagaggccagggcagggcccgtgtttggggtccacgtcactcctggctgggaagcaggcatcgagcgacacttgactccggtgacccccatgctctggacctccacctcctgtgtgcgctttgtgggcagttgtcgggaggggaccccccatgctgtggacctccgcctcctgtgtgcgctttgtgggtgattgtcgggaggggagtggtggtgacgccgctgctcctgcctggagggagtgccgtgggggctggtgagggtccacactgggcggagttaggctccaattcctcctcggcttcctgctgttaggcctcgtggagtcgcgtccctgccggtgcttgcccttggcccatgacggtaaccgcccagcactctgtccccggggccctgaactccggaaaccccactgggtaggctgtgcgtcccgcctgggaggatggggtgtgggacgcgtgggtgggggacggtccccgcagtggggaggggaggtgccgcgcctggcctcatgggcactgcagccaccctgggtgcagctcctctgctttgggaccttgggaggcattggtcccacccccactgctagttcatctcttaaagtgagggtgcagctccagggcccgaggtttccccaaccaggaaggatgtcctggacccgggctcaggtctcctgacccagcacgtggctgcccagagccctggcaccagggtgcacctagaggaggggccccacgctgatggcttctgcaaggatggggaccggggacagctctgggcagtcagtgagggagctgctgctcaggggtggacacagggagggggtcggctggccaggggggcagagcttctgcatcggggcaaggctggcccaggagaggccgtggggagatgtcgtcagccccggcagagcccctgcaatgaatggagctgtggctttgagcgggcagaggggacgggagatgcgaggggctgtcatctgccagtgtgagcaggaagggatggggactgattccttccccagatcagcgcagagctagggttaaaagaaagcgggtgctgagggctattttgggcagacacaaaatgtctgtcattcatattttaagagatccatgaataaaagatgaagtctcctggcccgaggctaagtgtagggctggtctgaggactctgcgtctctgccttcccgccgtcgtctgggtcccatctcactgtgtggacggcagatctgagaaggcgcctggtgtggccttgcgggttctctgttccttttaaggcccaggtcgctgtcccatgtgaacattcggccaggtgggcggctgccttggccggctgaccacaaggagtgcaggcgagctcccgaagattcccacggttaactgagggtgagaagctccgcgggcagccggagcctgcctggggtggacgtcagagatgagagtgtcctggcccgcccgtgcccttagtcaaggcccagcttggtggtttggagatcccaggactaaaggaaatagccagcagcactcaggaaacctcctcagttcctccacctgtccatgggggactgcagtgctcgttggcaccccccgcaggtgcaggcagggcaggatctacggtgggtccacgcccctgtccccaagttcagtcatcaggagggcaggtgcagcttcccactgtagcacagcgtgcgccttcttctaaagagaggacctggggacatgtaggcttgggtgggtgactcagccttcctgggaagtggtgtgtactgcgggagtgggactggctgtgcctgccagggtcctttggcccgaagtgtgaggtgtctgcgcagcctgccctggccaggcaggtggggtggagacgctgtatatcgtgagacgtgttcctggctgaccactccctccatgtcccatggagccaggaggagctgcaggagtcaccagattccacacggagcagcttggggcccgcggtcacaggacggtcaggcagttgcactgcttgtccggggcggtcacaggacggtcaggcagttgcactgcttgtccaggtctcgcctccatggccacagtgcagcttggaacttgtggttctgcagtggtttggtcacctctggccaccacgacgtctgctctaagaagggaggagccagcctctgcccacgggaaggtgtttaggggatgctggatgctgactcacgtggcttctctgtgtccacagcagggagagcaacaagccccggccctcagagctcagccggatgagcgcagcccagagacagcagcttctgtgagtgcacctgcccacctcctcaggggttcagctcctgagtgccctcaccctgcccaccctctccaggggttcagctcctatgtgccctcaccccgcccaccctctccaggggttcagctcctgagtgccctcaccccgcccaccctctccaggggttcagctcctatgtgccctcaccccgcccaccctctccaggggttcagctcctgagtgccctcaccccgcccaccctctccagggattcagctcctgagtgccctcaccccgcccaccctctccaggggttcagctcctatgtgccctcgccccgcccaccctctccagggattcagctcctgagtgccctcaccccgcccaccctctccaggggttcagctcctatgtgccctcgccccgcccaccctctccaggggttcagctcctgtgtgcccccaccccgccctctccaggggtcctgagtgcctccagcctgccctcccaggggttcagcggctgagagccccgcccgtgcctctagtcccctccacgctgctccgctggctcctgcctgtctgctccaggggggcttttcagtgcagtcaggtcctgtggccctgggtcaagtcccgcctcccaggaaggcttccaaggggagtcatggatctaaaatgatgggtggacgcagccccatctccgcccctcccctccgctggctggttgaaatctggatgatacgtttggttctgtgactgggcactgcggcccccagttagcagggctaggacactgatttgcagaaatttgtactcagttgtcctcttgggtacaaaaatctccagaccacgcacgctctcttgcctctttgcagactcagctccagtttccactgagagagccacattttacgcccttgtaagatggttttagttagctgctgggatgatttttcctgtggtttgaaatggctttactcaggtgtttatcagtgggagcgttttgtgtcagttctaccgaggcccattgtgcctttccagttgagagtctgaagtctgttttgtgagttcgattatgcttagaagctgctgtctgttttgtgagtacagttatgttgggaagctggtgtcgaatggtagctccaaagatttctttattgtctcggcccttcttcaggggcaccaattatgcacttactggatctctctaatctatctgtcttccatctcatgttctctaatccatttttactctagacactttgtagggtctaggtgaagtatagatagtatagtaaactgtcttttttagttttttaaaaagtttttatttttattttttagagacagttccttgctctgtggcccaggctggagtgcagaggtgtgatcaaggctcactgcagcctccgcctcctgggctgcagcgatcctcctgcctcggcctcctgaggagcagggtcttcccgtagatctttgtgtttgtcctctttggtttctgcttctctgtttatgaactgagttcttcccaggccagtcttgtctggagacagtttgcgaacagcagagccctctccgtgtggccatcgtcctgcctggcctccctctccgcctctccccagtgcacagcctggtccggggagcccctccctgcctggacagggcgacgggttttcctcttgcagactgtctgtcgcccgcacccctcggtgcccccatgtccttgcggtcgcggcattttgaagcagctcaggttaacgggtctcctggtttcatcaaagatggagtttggtttctcgctgcttctgagaggagagcaggaggccccttccttgttcactccgtgttttggagccagaggtctgttccctttcatgtccatggtgctttctggcgcctgtggacagggctcaggtgtttgagtggcttggatccttcgatcccaagatcccagtgggaagcaagagtgttcccctccctgggtcatgctcccctgggggcttcatgttgggcatgagccttgtagctcctggagctggtggtccgtgccccaaggctgctcccctgagtacgaaaccaaggaagggcttttctctcaggtgggaggccccgtctatgggtctctgtttacggttgtccaggatggcatctggaggcctggcccagcatgggagccacacagtgccaggggcaccgaacccgtgtcccatagtgtctaaactcaggcgcaggcacaggctccccctgcagcccctccccgtgcagcttcgcttccaagcgtcactgtcacggctcctttccttccccagctctgacccaggactctgcccagtggaccacagtgctaagaacctggcctgggccttcccctggcctcggctcctcagttgccccaggtggggccttgttgggtcctggtagccccagagatcactagtaatgtccaggctgtgactggggcatttcaccctgactttacggggacagccccagctgccatgctggggccagggtggcagtggcaggaggaggtggtggttagtgaccagcagagccctgaccgcctcctgctgtggagacggccccagccccactgtcctctgtggctctggtgtgtgggcaccccgcccaggcggtcgtccagcggggtgtgaaagagccttgtcaactgcccaggaaaccagggccagtgtggtccagccttgcacaaggctccgtgcacacggggcacacaggccggaggggtacaggccccacctccccgccaccaggctcagggcctcttggcagctgcggcagagcccgtctgggagctgcccccgaggcttctgtgcctgagaggggacccaggccaccttttgtgttccacagggcagctctctggcgtgcggctggctgcgcggggtttagagcaggagctgagtggccgccgggctgggtggcggctggggtgagctggtgccatgctgggtcgtcgccgtggcacccatctggggctgccgcgccccactctgctgcaggcctctgccggctcaggctctcggctctcggctctcggctctcctctgtgtgcacctattttggttgcccgtggagggagccgtctctcatgtaaggagtgagtctgcagggcttgggagttgccgccgcgtttctcagccttggcggcagccccatcagccccagacttgctggctgggtgacacctcaacggcagaccccacagtgggcgctgccagggctctgggatgcacgtggccacgaggagggcccggggcagcctctcccctcctgccggaagtttccgaggccccagtactcagtcccgtggtggccccaggcctctgccattcatttcggtgtctgacgtttccgggtgttgaggggctgaggggtccgggggttcctgcctgctgatctgtggtctccattctttcagcgaggaagaaaggacccggtttcaggagctgctggccagtccggcctacagagccagccccctggtggccatcgggcagacgctggcccggcagatgcagctggaagatggcggccagctctgaccagggcagcgggcatgccacaactcctcaggacacatgtgggccaagtagagagcgccggcccctcaaggaccatggcctgagcctggtggacgcccttccctctggtcggttgtggggctcaataaatggctctgtgaacttcccctgcactgccagggccgttcccatgagctgcttccctgattcacagggctgggcacaccctgggacagctgcccccactctcctcaggacaacaagccacatccctccactgggggccccagcccccacgcagtcagggtggaccgtgcacagggtttgtggggactgcagttgtggaggccccaagtccgtccctgagcaggcgctggtgcccacaagatagtctgctggctgtgttgggaaggaattgtgcctgggtgtggccccagctgtgccaccagccgccctgatttgcttcagcctcagttcctgctgcggccctggtaggatccaggagcactgaggcctgcaggggctgccgtgggggctggctcagggccttcaccacctgggggtctgtttcccttccagtctcccctgccatcctcagtgaccagggacacagatggccctggcaaggcccccggcctgctcctcgcctgtgggctgcaccccccctaccccacccgttgccctcaccctacccagctgctccacacccaggcagcccactgccttgctctgggggcggagagcagagggtccttctgcagggaggagacgcggagtgggcccagccctgaagctcttgctgacccggaagtgagagaggtcctcctttgttgctggaagccctgggatttgggggttggtttttggactgtgaatcagtgactgatcagtccttgttttcaggttgtggaaagcaagggggtggtgcgtccccaggcccctgaggcccagcttggctccccctgcccgagctccccccgtcccagggccctgcagggcctcgctggcccatgtcctgcagcggggctgggcaggctggatgtggtggtgtaccccactcagagtgtctgggaagtgcagagcaggaccactctcagctcccaggcgggggcccagcaccctgagccttcccaggctgcctggggtgggggtggtcccagggactctggggcctcctggctccagggcatgtgggtggcccctatgcacagcccctcttgttgtgagcccccatgatccgacctcctctggccttgctgcctgctcagggttcatagccccagcagccccgccaaggatgcctggcgagtgggtggccgaggcaagttggagcctgtgtccctgctgttcagtgtcctggcccttccctgacacgagcagacacggcatccacagagacagcccggacaccctccaaggccccggccgatgggacagacgggcgtacaggagccataggcagcagatcccacgctccctcggccggggccagcttggctgcccagccccagctccttagagaacgggcttctcgcttcagaggagctggtcacaaaccagtggtcgcgacaaaaccattcctgtggtggagcgcgtgtggggcgcgtgtggggcgcgtgtggggcgcgtgtggagcgggtgtggggcgcgtgtggaacgtgtgtggggcgggtgtggggcgggtgtggggcgggtgtggggcgcgtgtggggcgggtgtggggcgcgtgtggggcgggtgtggggcgcgtgtggggcgggtgtggggcgcgtgtggggcgggtgtggggcgcgtgtggggcgggtgtggggcgcgtgtggaacgtgtgtggggcgcgtgtggagcgggtgtggggcgggtgtggggcgcgtgtggggcgggtgtggggcgcgtgtggggcgggtgtggggcacgtgtggaacgtgtgtggaacgtgtgtggggcgcgtgtggggcgggtgtggggcgcgtgtggggcgggtgtggagcgcgtgaggggcgcgtgtggggcgggtgtggggcgggtgtggggcgcgtgtggggcggatgtggggcgcgtgttgggaacagcgtccgggatgcacagagcacagcgcggtggggaggcggcaggggcggcttccacttcctccagcatcccaatcccaccgtctgggtttcttgtgaaaaacctggccgggcgcagtggcgcacacctgtagtcccagcacttggggaggccaaggcagtcgtatcacttgaggccaggagttcaagaccagccaacatagtgagaccccatcttgacaaaaaaatagaaaaattagccgggtgtggtggtgcgtgcctgtagtcagctactggggaggctgaggtgggaggattgcttgagcctaggaggccgtggctatagtgagccaagattgcgccacagcactcccacctgggtgacagggtgatcctctctctaaaaaataaaaacgtaaaaatgttttttgcttcctggttttgaaatgactcttgtctggttgtggctcgcagcccctcttctagggatccttgcgggctcaggggcctctaactcctccctgggtaagcagcccccggcggtgcctgagagtcgtgtggaggagggtgccgcggaagggaggaggatgccgcggaagggaggagggtgccgcggaagggcggagggtgccgtggaaggacagcgacaggtacttggccgggcaggagtggcagcaggtgtcccatcggctgagatggatgcagattgtcccaggaaagtagcccttgatagtatttgcgggggtgccaccccagcattctttgcaggtgcagagcccaaccctcagctaaggccgcagctggggcagggtcatcttgtgacagaagggcgtccaagtgtggggttatccgtggctgtcagctgagcgctcctggccaccattgagagggaggctccaggcggaggatggggtgtgtgcattctctggacagacacctggggtagagcccctgaatcagcagatcagagaggatgactgtaggagcttcaggagcaggaacatgaatccctcggtaatcgatttaaacaagttctacagttgactcggctttcatgccttttagaccctggggccctcggtgcatttttccgagttaaagggttaacacagcagatcaaagcttcctggggcctggaggtgcctggcgctggcctgcaggactctgagaagctctgggctgggaccgtggatgccaggctcaaggcccgcagacctgggctgggcacgtcccgggtgcctcagccccaggcccagtgttggcatatgggggactgtggggcacaatgggagacaggagaggcagtgggaggagccccccaccctgccagtcccgcaggaagggcagtgtctggttgcagggggtgtggggtgttggccaaaggaatagcaaatgcctggcccagagtgaagggctcctggctgggatggccacaggccctggggggtctccctcagccccgggcaggcccaggttctccttccaggcgcccgggatctcctttgtccctggctgtcctcaggctgcacttagtgtggccactccaaggggggctgaggaaaccacctctcagcacctaccaggcttctgtaaggcccacacccagcagctattggatccgcctttccccaagaaagcccccggccctccccttcttctcaggcccctcactgagtcagcaatccctgttcccaggagctgtgtgtccgtcaccaactgccgtcctggtcctcaagcaagcagggaccgttcccactgctccggggcaggccccgcacaccctggccagcctcgctggctcctggagctgccgtgacaaacgcacacagtgggggcgtcaggcagcagtgcattgtctgtgtcccggaggccggtggtctgcacttggggtgtcgagagccgcctccctcaggctgcagggcagggtccttctttgcctgtccggctgctggtgattacttgtgtttctgattccagacgcttcctcctggtgccacagatgccggcagcccttggtttcctggcttgtggccacgtcactcgcgtcgctgtgtctgtgacgccccataaggacaccggccatgttgggttagggccctccctgctccagtgtggcctcatcttgactggttccaaatatggtccggctctgaggttctgggggacgtgagttttgggaaatctccagtctagggggtggtcttgggcaccagggttttagacgcccctgccgcaggtgggagggggcctgcagctggagctgagcaccatgggcgtggtgggggctgcggaggtggtgtgggcctcatggccaggagttggggcctgggcagccatagggggctgctgatggccacgaatgggctgaggctgggatgtgaggattagggaaggaaagtggaagctgttccagggcccgtggggtcgtccacgccggctccccttgcccacccggacctctggccccttctcagggtctgatctcccagtgcaaacagaagcacccggcccctgcctttgtccagcaccttcctggcctggccacgatgctcctggacactttgggccccggttttcctttcttatttcctcaccggaaggaaagctcctgagagcagggtctttgccctgtgcgtgctgtgtgagcagcaccgggactgtgcacagatgagtgaatgagaggcaggagacagcggggcctggatgggccctgcacacagagcctgcgtgtggtgttcacgggggacagcggggcccggacggggccctgcacacagagcctgcgtgtggtgttcagaggggacagcggggcctggacgggccctgcacacagagcctgcgtgtggtgttcacgggggacagcggggcccggacggggccctgcacacagagcctgcgtgtggtgttcagaggggacagcggggcctggacggggccctgcacacagagcctgcgtgtggtgttcaggggggacagcggggcccggacggggccctgcacacagagcctgcgtgtggtgttcaggggggacagcggggcctggacggggccctgcacacagagcctgcgtgtggtgttcaggggggacagcggggcctggacgggccctgcacacagagcctgcgtgtggtgttcacgggggacagcggggcctggacggggccctgcacacagagcctgcgtgtggtgttcagagggggacagcggggcctggacggggccctgcacacagagcctgcgtgtggtgttcacgggggacagcggggcctggacggggccctgcacacagagcctgcgtgtggtgttcagagggggacagcggggcctggacggggccctgcacacagagcctgcgtgtggtgttcaggggggacagcggggcctggacggggccctgcacacagagcctgcgtgtggtgttcagaggggacagcggggcctggacgggcccctgcacacagagcctgcgtgtggtgttaagagggacagcggggccttgacggggccctgcacacagagcctggtgtggtgttcagggggacagcggggcctggacgggccctgcacacagagcctgcgtgtggtgttcacggggacagcgggggcctggacggggccctgcacacagagctgactccagcgtcccgatggacctctccctgagctgtccgtctcagcctgcccgttctaccttcccctgtgggcaagcgtggtggggtccacccagatcaccccagacgtgtgagtgcgtcagctcccggcaaggggtgtgttccgtgcagcattgccgtgggaggcggcgggaccctgtgctggccctgagggctggcttgcattcgggtcccttgctccgctgcctggatcgctgggctctgagagtgccccacgcgagggctttgtcttgatgaggcctgcacctggcttgtccaggccccacagcggccttgcaccagcctgagtttgtccctgaaggttacatcgggtctgtgaccttcgtcttgtgtggggagggagggcggtgacgggccgcatcgggcaggggcaaggcacagccgcgacccccaggctggtgagtcagggttctgtgctgcttggaagccaagtgttgtacaaacaccgggcgtgttgattctggaatgttccctatgtggcgataacgccggtgacggcagccactgtcgttgctctgagacgctggtgggtgctggctgccgcccaggccttgtctgcctgcagcccccggcggcccctccagcctggtgggttctcagctgccgccgtgaccagggttttccagggacactgctatcagtgagcgcttccaggatgccggggtggctgccggcgggcggggaggcaggatgctggtcttgcctccttcccctttgaagttgccgtcttggggcgtctgtgctgggccctggctcctggcgctgagaccctcatggaaagctcccttcttttaaagtcaaacagacccaattaaagtgttttttccaaagatgttaaaataatgtgggtcagagtgataatgacaggcctcttccctggcttgtttcagccttccctgaagatgaggaagttttcattttaaaatttttggtggggtatttctcagagaaaaccggtgatgacatgttttctgattctaaatacttcttcccggtgacacacatgcagaggcgcctggggcctgagagtccctgcaagtactgtggagcagaggcctcatctcctggtggccggagccacataggacagaaggccctggagccctgagtggggaaactgaggcccaagaggagagagcctccctccccagccagccaggtgatggcgctgagattcaggagcacggagcttctgactctcgcctccatgttcaaggtcagcgtccaccccaggccccgtgttacttgctgagcctcctgctgtgctcaggtctgtgtgagggggaccgcggtgcacactccagtgtcccgggaggagcggcccccaggcgtcacggggccggaggcaggggccgcccctccacagggtccgagacagaatctattttccatttgagcctctccctcccgaactccaagttcaggggtgggattcacatactctcacaccccgctccacacaccccacactcacatcccctcacatacacacccctccccacaccccacacactcacaccccacatacacccctacacacaccctacacacacacaccccccacacacaccccacacacccacacaccccacacaccccacacccacacaccccacacccacacacccccatacacccccatacacccccatacacccccccacacacacgcccacacacacccacacacacgccacatacacccccaaacacccccacacatacatccgacacatgccccccacactcacacccctccatacaccccaatacacaccccccacacttgcacccctccactcacacatcgcacacacactgcacacacacaccctcccacacaccccacagtcccacacaccccacacacccctccatacatcccccccacacagccccccacacacccccaacactggcgcccaccctgctgtctcaggagaagcccccatgctgggcctatggcctctcgggctctggcatcccccaccggccccgatggtggcggtgaccacacgcagtcgtaaggacgggcggcgtgagggccccgctgagccgagtgtgacctgtgtgctccagcctggagctggcatggccggggcgcccttcatgggtggcagagtcctggcctccccgccttcccagtgggtagcacactcccctcttcccccggccttagctctggatttcctggcacagccgtgattactccacctcggccccctcccctgggcccggaagactaattaaccctgatgtttaattggagaacacggccgggcctgtgtctgtgcggctcctgtgggatgggggcagccttctgtctctcccctctggaactctgcatggctcctgggtggcctggggtttgactggacctggcctttgccccacggcccctccacccccggcgaaactgcccccacccacacagggcctggctcccgctgcctgaaccctgtccctggcagggcccacaagctctgtctcatttgtgcgacagccgtgatccctgctccagcccgccccctcggagctcagccacgggggcataggatggccacaggaagtcctgtcccctgtacccttgggccggccctgaagtctcccgggagggaaaggggtgcctgtgggaggcgggagagttctgattggagggtggtcagccctgggccctggagagacagccccagtggggactgaggagggtggaggtgaggctgggcgggtagcaggcagcttccggccaggaggtgctcggggaccaggatccccactcccgactttgctgctttgggatgagctctggcaggtggggcgcaggggcaggcagaactcaggcccatgtggaacaggcggggacgggctcgccgggcccgggaatgagcggggcctgccggcctcccagtctcatggcaggctgcttgtaagagaagacccgagtcctggtggcttgtgtttaaaatgcggtgggcctttccgtctcaaagtgagaagtctgggcacaggcagtcccagcctctacgatgccattggtagcccggggccaccacccttccctcgttctcatgccaaacagctgccagagccccagctgtcacgtctgcatcccagtccccgagatgaggctgtgggccccacaaagctggtgcttttgcttacaggtactgagcatggaggcagcagggaagctggcaggaagctccctgccctccagggaaggtatctgtcccctgttgcccaggccatgggcagggacaggaaagcagcttgcaaatcctctggggtgactgggctcgggcaggggccccatgtcacagacgctcccagccctgcaggcgggagcttgcattttccagagagaaagtccagagcgggtggggggtgaacggcgtgccagggctgatcctctgtcaggcccttgtggtctggtgctgctggagtgctctagggggagagggtgcctgtcccaaggagcagggacggtgccctgtttgctgcagaaacacaggcacacctgctgtctgttagaagacagccgcttacctgcaccccagtatgcccccaggagatgcctgcaccacctctgggagagagtgggcagctcagccaggggcccaggccagcccgggcaggggtggccaaaacccatgccaacaggacatctctggcctctggggacagaacccggcaccatcgaagcctcaggaaggcctggactctggggagccctccacagagctgggagggagccccagggcctctctgttcccatcggcagctctgcggcctgcggtcccgggttcctgtgtccgctgaccacatgccatgatcgctgcccgctggagagcaggacccagggtgaggtctctgcccgcaacatgaggcccagtgggtggtttgctattggcttggcctcagacctggtggctgaggctttggggaggtcatgctccctctgtgggcctcagttgaccctcctctgtaagctaggggagctggagtggacccctgagaccctcccggcagctctgttctggggcttctgtgcccctgtaatggacgcgctgccttggccccagaccccatcctttggcggctgctgctccccgcctgtttccactggacccttcagctgccaaccagcctgggcctccccgccctgggcagtgggcacatggccaagcccagctggactgaccctcagggccctgctgaaagtgccaccaggaggcatctatgcatgggtgtctcgaaaacccaaaatcctttccaacgggcactgctgctggtcagtgtcagccaacctctgtggcctggtgcatggggagggttggggctccaggtctgcagacacgaggcagcagccacctctgctcaggatggcgcagggccctgggatccctaggacccagcccgtggaccccaggctccggggtgccatgctggtcacgttcctccttcccagaagcatcctggctcccccgggctcagtgagaagtggccgaggactcaggccagaggacagctgagccccgtggcacttgggtccactcagacaaggccctgcctgggggtgatgctgggggccggggcggtggccgtgctgaccactggctgctagggtggggggccccatactccccactcaagcttcgggggtgggctggtgtccaggtttagacgaggcaggtgggacccagaagcacaggctgcttacagagcagcaggtggttctcattgccagacggacaggcctgggaccagcctctcggccctggggttcctgtgtgctccaaggacctgcggcctcggctgcaggagaggccagtgcagccaggcaggcccagctccgagagccaggctggggtgggcttcccgccgggcactgctccacccgccttctccctgaaggtcccattccaccacaactggaaccaaggcctctgctcacccccaggcccccagcagtgttgcctgcagactcatctctgccacgtcccccatcgcagtctcctcccagcatactccaaggctgcctcctccgaggagccttcccagctgctccgtgggtggccctgtccctgcccctccctcccgtggccctgtgcatccctcctggccctcttttccaaggccggaagtcagacaccttttgggatctgcgtgcctgagtcctgcggcccttcctggaggggaagctcggcagagccccccaattccctcccactcctcaccaccccttcctgcggtccctgggatggggagggcttattcacagccgacttggccagggaggtgtgggccaggccggagccgctgcaggcgcttcacccagacaggccggagcccgtgggctgggaccagggcagagtcgtagaagctgcacaaagatgtttaggggccacatgctgccgtggaggccgtgcaatgaaatcggccccatccagagcccccgtccttggaagaacaactggcctgtggctgtgtgggctcctcaggtggccccccccggggcgtggagagcggccgagccagggccagtgctcttggtccacacgggcttcccagccggcttgcaaggtccccgttcacccgattccccaaaggagacctcctgtcacgacaacgtgagtgctccacagccaggggaggtgctgcagctgcagaggatgggcacgcggcactgacccctgccgagggggcacccaagcggcctcgtccttcccgcaacccaaggaaggaagccccagggtttcccaaagtcctcaggggaaagcctgctgaaaagcacaattgcacctagaaagtcaaggcacacccgcagtctcgcccgtgctctctggggcggagctagggggcatgtgtgcatgcatgtgtgtgcgtgtgtgtgcacgcctgtgtgtgcatgtgtgtgtgtgcacatgtgtgcatgtgggcgcctttgtgtgcatgtgtgcatgtgtgtgcgtgtgtgcgggcaggcgtgcatgtgtgcgtgtgcatgcgtgtgcgtgcgtgtgtgtgcgtgtgcgtgtgcatggtttcagaggcaaacccaagcattctcaaccagcatgtaggcatttgcttttatgcacgcagtctatcagagtagggatgaagcccatcattcctaattgtggaacacttttgtcaggagattttattgactttcctctcggtgccctttgagaaaattgtgtttttctattgtttgtcctgctggcaggtgaaaggtgttttcctcctgcgtgctgcacagcctgagtttctgaagtcccgagctcacggacgggaattcctgggccgggctgtattttgcctgctggggcctcgttttggagttgtcctctgcccatgagtgaactggcccgtaaccttctgttccaatttcatattctggggcagcagagggttcctcctggctggtatccggccctggctgaacagaggcctgccctgcagctcaggagtcgtgtctctgacgccttggggttgcaggttttcagcagtgtcactgaagttgcagccagtagggacggggacgtgcttgccggccacctccctgcccctgccctgcccttggcaggtggtcccccaaagcgggaccccaccctgcctgccctgctgctccccggcctggtgcgcatagaggtcaggacccctaacttctcccctccccacagctgcaaaccttgctgggggctcagagccaggcagcccaggcctgagggaggcctgtctgacagcaaggcttctgtgtcgcttctcaggaccaggtgtcctgtctgtccttgtccccacctggaacttccccctgggtgggggtcctggggttctttgaggccgctgctgcccactactacctgctactcccaggggtcccagcactggtctggccctcttatgtcctgatgctcgggccactgtcctgctcctgacattccaggatgagccccatccctgtgttctctgggtttgtgggcctctgacaaggttgttcccttgagtttctcactagacagtcccctcccatcctaccatggggcctgctcctgtctccttgtcactgtttgatgaaaccctgtttgtgggattccacactctggcgggtgagcatgcagctgaggtcagccccctgggaacagtgccactgcagctgcaatgtgcacacgtgaggcaccccccaggcacacaggaaggctggaaacaagccctgtgtctcactgaggtgagaggtgcttggacactcacccgatgccctccagagccgctgtgaggtcagagaggagctgatgccgccgtggcagacagcgcggggcagcttccagaaggtggccagaaacacactgggaggaaaacttctcatctgaaatgtttttattataaatgagagaatagaaaatagatgaactaaacattcaatttcagacagtagaaaagaaaaccactataagcccagaggctgaggaagcagaccgttgtgcgaggggagatgaaagccaggcttggcttggcagacggaaaacagccgctgtgataaacccaaggccgaaagccgtctccggggagcagctcgcatggcacctgggtgacctgacagctttctgacctgaagccaccatccggaatgtgattcattccctctctgcccggaggatccgtcccaggagggtcaggagcagccctggggccggatgaccacggcgtcccctctctgcccggaggatccgtcccaggagggtcaggagcagtcctggggccggatgaccatggcgtccccggaccattctctggagctggcagcctggggcaaggcacgtggcctctctgtgcagcacctggctcttgtgtaacacggatggtggcaggctctgggcagaggagggtggagaggcctaaggtgcccatgctggtctgtacgtcggacggtggggccggcctgcgccccgcaagcaggagctgagccctgggcctgcagattctgtggtgtgtcggtgcagtgctcagcatcagccgtgacggtcacactggcactcgctgtctgtgtcacgcattcgcatccactgtcagcgcgtcacagtggcgttcgcggtgaggatggggcgttgccgttggccggtgtctcagcgcactggctgtcgggctggtccccctgggttcgctgctggcgtgcttgttctccgagcactcgccgttcacgtcctctccgttccacactggcctttgctattttctccacgcgggtcttatggatgctgtccgagctgtggagcatctgccctcctggccctcctgcagctcgggctgtgctctggatgagcgagggcaacgttagctgagcgtggggggccttgaggtctctgctgcactttcccgaaggctgaggtccctggggaccactgagccgccccatgggccttccacagcactgccggtgccagagggcagaactcggaccgactcttgcctcatctgccctctgttccgaggagaacccttccggactgggccacagggagtccagccgaggttcggagggtggtcaggggtctggctgccccaagggggtgcttctcagagctttgggaagacaccggagcccaagggtctggatggccgtggctgagctgggtctgagaggccaagaccaggagggcatcacatgcacccgtgtcagggccagctgggatgggagactgaggccggggcgggtgtccgggtgccccccacagctgtgctggggcaagtctggggacaccacctcctcagccctgtccaggagtgtggaccccaggcatcaactgtccaggggcctgtccaggagtgtggaccccaggcatcaactgaccagagccctgtccaggagtgtggaccccaggcatcaactgaccagagccctgtccaggagtgtggaccccaggaatcaactgtccgggggcctgtccaggagtgtggaccccaggcatcaactgtccagagccctgtccaggagtgtggaccccaggcatcaactgtccaggggcctggggcatccatgggccacacggcagcgctgaaaacacagggcccttgcacccagggcagacctcagcacagttggagacatcactcctgccctccttgcgctcggcccgagagctagagcttgctcagctcagccccaggaggaagcagaaccgcagcctccagaacattggggtgaccccgtcgctgagggtcccctggcccaaggccagcgtgtgtcttccgggggaggaatgacctctggagccgccatccccagcctcggcagcaggggctccagggtccgggagccaaaactcagcagctgctgggtgtgcagggaaagttgtttagataaaatccaaacaagcacctcatatattacaggaggctgtaaaacaaacttagccttgtgctaatattttggtttggtttccactatccacacctagaagaatgtgagcgccatcccagcccggcggtcagtaacattccaggagctttggggagcgtctccattgccagtcaagagccaggcgccacgcaccccagtccggagggaccgctcagcctcgggctaaaaaagggagagagcgcaagcagatggcgtccacagccgcgtctccaggccacagcgggcacctgcagggcagctgggaatgggaagggcagaggcggccagaagctcgtgccctcactgatgccggccctggcagttctttccaaaaatcttcccactcagctccctgagtcccacggatcaggcgcccttagcctgctgtgcagggggtgggggagactgaggcacagaaggccgggccccccaggcaccaagcacggcccatgacccagagccatggagtcacccaggccgcacagctggtgagagcagccctagatgaggcggagccactgggttcaaggccagagttcctgctgcacccccgacccctggtcccgccatggaaggtgccaggagtcatgttccctgggctcctcttcccccaaaagcccctcctcatgtatgcatgagtgtgtgtgtgtgtgtgagagtgtgtgtgtgcacgtttccctgcctgagcactgagcacacctccgcacaggcaactgctgccaccacctcatggtctcccagtagccactatgaggagggcagaggccaccgcctctagcccagcaggacgagggcctcgtgacccgtggggggagcagagcagggtctgtgtgcctcgtgacccctggggggtgggcagagcagggtctgtgtgcctcgtgacccctggggggtgggcagagcagggtctgtgtgcagggttccttgccaggcacgtggccagcactgcaggagctggcattgtggtggctcggacgccctgaccccgtgttgatgtttttggtgcagccctgcccgcgtggccttagggtgacccatgtgaccacagcccatggcgggcacagcacaagggaggccacttccaggcctagggggttagactgtggcttctggcacctggaggagacttggcagcctgggggtgccacatggtcaggggctgaggcctccccacagccccgtgagccccgtcctggacaaggggctgcccgtggctgccacctgagccacagccaccagccatgctgcccctgaaacgggggagctaacacgtggaggcatttttaagctgctacgttttggggtatttgctacacggctatagatgtctgatacgctgtggggtatgccctgaatgtggggtctggttggccctaggctagcatcaagctttgggcagccagggccccaaagcccccactcctgcccactgtggccacgcgcctgcaggaccagtcccgccgctgtgtgggcctcgcctctggacacaggccccaggacccccgaactgaggctggcctggctccacgtcctcccgcccactcccgttcagcgctgccaggcaccgtaccctctgctgcccaccaggacccggctcctggcaggcctgagcctcctccccatctcccttcaccctccctgagcaccccccgggcccatgggcccagcctgctgagggtgacttcttcacacccaggctcttggcccagcctcctcacccctgtccctgggacttcctcctggccacaccatccttccagcagtgctcccaacacacatggccatccctggggagtcttccaggcagccctacccaccatctccacccacctccttcccacctgctcaccacgaggtcctgttcccagcatacggccctgctgctggctggggaggagatctgacccctcctgggccactgtcagcatccccgggacacagtgctgccggcctccctttggagtccaaccctgtcctgtccccacctgccccgtcctcctacctgtgctggttctggtgagcctgtcaggtgacacaccctggctgtctcctccatggggcacccagtgaagccgagggaggaccctggggctgggactcagtttcccctcctaggggccacgaactggtctggatgccacaggctgctgagggaggacaggtcgagggcaccatcgagggtgagtcttggtcggctggcagagggctggcccagggagccccgtccctccctgagggccccgcctgctcagtactgtggcccgtggcccgggtttggcctgtccatcagatccagcccttcggcaccggtgtccccagggccctgggctgtgagggggtgtggaggggaaggaaggacatctgggggcggctgtcacacatgggagcatcgctgacggagaagttttcctataaatgcagctgtgttcatggatgttccaaatggaactgccagctggcttttggtttatgagactttattaaagattacatttctgtttagttatttattaggtgtttagccaatatttctaaatagaggacatgatgctgagactggggctacatggccatggttgtgtgagtgtgcgtgtgtgtgtgttgtgtgtgtgtgtgtgcacgtataagtgcatgtgtgagcatgtgtgcatgcgtgagcgtgtctgcatgaaacagagctttcttgttcttgaacttctggggcccgaggcgtccgaatgctcgaggaacgatgatctgcaaagcaggattccgcagcaagttggtgcccgcggaagctgagcatcaatttgctcttagggaattttccatgttcttccatctccccgtttaggtgccaggtcccggcctgcagggtggggctatcgggcctctgccacctgcttcgtggtgagactcctgggcgcccacagcctccgcctggcaggccagcccaacagagcctgtttcatcagatggtgtttccaggagccaaataacaaacacactttctggaaacagccaggaggagcagccgtctcccaagaggggaaggaaaacaagaggccgctgcggctccactccccatgaccgcctggacctgcagcaggctggtgcaaaggccctggagcagtggccactgctgtctgcacaccagggcccagcccatggccagacctggggccggtgggtgtggactggagcctggggctctgccagcccctcctctggtgccaggctggtctcccgaggcccagaggaggtaaaaacagagtctttaatgacaccaggagccattggccttcaaccactgcctccacagtctgggcaccccagccagcagcttgagggcctggcccaggcagaggctggggcaatgtgggatgctgtgagggctgcaggctctggtgggggcgaagctgccacctgctcagaggccatggcctccgcctcgggcacctgctcccagaaccgccggctgcaggggaacctgcctccatcacccctcaagcccgggccctgatgcagggtgaggggggaagcctcccagaggaagatgcaggcttgcaggcagctggaggtcgtggcctgagctctgctgagactcgcgtacgacattgtgtagaaaatctgctttttaaactcagcctgctgcagagatgaaaggaggctctgtgcctgcggcgctttgccgcccattggagttgggtgttggctttgcatgggaccagtgattctggcaagcttggcctgtcggccgggtctgcagcccttgccggctagggcaaggtgtggaacgggagccaaagacagggtcccagcccaccccctacaggggacccatgttgggaaagacagggtcccacccaccccccacaggggacccatgttgggaaagacacgcgggggctcgggacgggttctgcaaaacttgcgggggcggccacatggggttcccagtatgtgtgacctggggacgcagcggcaaggcagctggcaccatgggcaggtaggtgcagagccagtgaggtgcccagcagcagccccgcctgagcctccaggcccacctgcctcctttcccagcctcagtggggaaggaggagactttcaggcccctagagtctgaccaaggccccagctccagtgcaggacccgttggccaagatgcaggggagagaaagggcccccctctgaggtcctcgggaggctggggaggacctctgggggccgctcagtggtgaggtctgttccgcctgcccctgcctgcccccctcactgaacaagggcatccaagggcacatcaaaaagatcccagagtggctctgggtggaagcaagaaacagaccccaagagggggcttcactgcctccacctggcctgctccagaagccgctggccgtgggtctgagtgcccgtgggcaggctggcggctgctggcctctcaacctccagccaccagacggcagttgacacagcctcctccaggtccctgggctcctttcagctctgtaacctgggaaagagctcacagggcacgagctcagccctgtcgcctccaggagtctcaccctgtattgtttgtctgcatcttcagctttgcgggtgccctgaggatgaggtgctgctgctgggtgttttttaaagtgccttggagaaggcggagtagctggtgccaggccaggcatctccagccctgagcgggaggatcccttccagccatggtccaggagcccggggctggggctggtctgggggctctggggccatctgcaccctggggactgctctggaggatgccctggtcccctgttccctgtggcaggaggaaggggctgtggggtgagcctccagccctccctgggtgagcagatgaccccatgtgggagaggccaggccctggtgtttgcacggcctggtcaaggccaccctggctgggcaggtgcaggtgcatctggaggctgtcgtgagactccctgcccaggactggacacaggctagacatgctgccctcgcagacacagctccctgggagcctcatgccgctgggaggaagatggggtgggtgccatgggaggaagatgggatgggtgccatggaagatgggtatcctgggaggatagtgggtgcccctggaggaaggcgggtgcccccagaggaaggtgggtgccccaggagaaaagtaggtgcctgggaagaaggtgggtgccctgagaggaaggcacctgggtatccctggaggaaagcgggtccccgtggaggaaggtgggcacgctggggaggaaggtgggtaccccggggaggaaggtgggtaccccgggaactgtggtgctccaggaggagggtgagtgccccgggaactgtggtgctccgggaggagggtgggtgccaagggtcagagttgctcagagctgtgatttgctcagccctgagcagctgggaacgggggtgctcggcccaatgccagctctgttcctgccctctgagatggggccctgagtcctgtttctgctgctgggctgcgcagggtggcagggcgggggccaggctgaggcctcaaggccacctccacagcaggcgggagggagccactgtcctgatgcccctgcagctctgggagctgggccccgggctgcttcctcctcccccggcgatgggggtcgctcacacgagccctgcaggggaacagccgacggggccgagtggtagcagctgtgtgtgggcccctgcatctccctcagtggtgggctcggtctgaggcagcacacacagctgtgcggggcaggccctgggcccatctcacggccaggaggaggagcacaggctgaagttgccccctgggaggtggcaccggactgcagcctccacagtggccaggggtgccgggggaggcccgggcctgtggcagacgatgccacgtggctgctcaggtcccacagccctgctggttcagacgccagcgccgtgtggactctgaagcctcgctggcctggctctccctccaccccacccagggccacgagtgctgtgccgtagaggcgtcccttgggcagtggtggtggcagtggagacagcctggcctcctcctgcacgccctcgccatccctgctgtgtggagctgtccccgcaccgggccgcgggctggcagcagggacagtagccagagtctggcctgccccctctggacctcctgcgccccagtccccatcttctgagggtgggaggggtcccctggcctgggccccatcagacaccttccagcctccctgggacggggagagacaggtgcacgaggagtggggctcagccgggctgagctcaacctctgaccctgcagggagtggtttggggacccccctggcctcagtttccctcatctgaaacaggaacctggacatgtccttggagcctctgcccatgccacagtccttgacccaccctccagaaggtttggcagggagcctggcaggatggtgccctgtcccctcaccttggcagggagcctggcgggatggtgccctgtcccctcaccttggcagggagcctggcgggatggtgccctgtcccctcaccttgggctgggagcttcgcagggggagcagcttctgtgcttcgtgctaggagcctcttggggaaggcactgtgtgccaccctgcctctccggggagaacagggctggtaacacgggcctggctccctgaagacggttggggaggcatggccagagctgcttcccaggccagttctgcctacctctcgcccgagacaagccctgtgcagagcagcggctcaccagacagcggcccagggggcccttccgttctcagaaaaggggaataggaacccttcactcttgtctgtccctgccagccagggttccagggctctggggctctgtgcagggttggggctcgcatctgtgtggatcccgggaacctgacaaaaggccaggctgtgcggcaccatcttggccgtggggccagtcctgggcgtgaccagtgcccggacccccgaccgggcagtacggcggctctgcgcaaacgtcccccctgcagggtcaagcagaactgtggtcgctgccaggctgcctggcacctcagcacctcggccctcactgcccacaggaatctgtcaggagccccaccccggccatgagctcggggggctggcgcccctgggctgggcatggcgcccctgggctgggcatggcgccgggcagaggctcatggatctgttgagtggatggacagacacagcccacaggtgagcgatggccttgccagtgtggacctgtgttcctgcaaggctgctttaaattgcttttgataaattgatttcccactgacttgttatattttcagaaacatttcctctgttttcactcatgactgagctttccgtcggccgtggcccccacgtgtagcaggcacctgcaggctgcccatcttcaccacatgtgctccccacctaagcaatgcagagaggccgctgtgggggtcgtccctactcaaggaaaaggactgggctggaggctggagccctgagttagagctccacgttggccgtggctgtgcggtctcctcttgggtagggtgttggccacttctcagggcacccggctggagcctcattcactgtgaagtgactgcagatgtctgaggaagaggcacctgctccttcaggtccctctgctcaccaggtactgggcacctctccggagctggagctctcagtcagcagacacttggcggccagggacggtcaggcctcagagcagagctggaaaacagagggcatcagacaaacatcacgtggctctgcaggacccggggcaggggcctccaggatggagaggctgggctgtgttggtggcaggtggccgggaggatgccccggggacctcacagctgttgttgcacccctaaaactccctctgcccagagtccttagggagtccgtgctgcgcaggtgctggggccgctgtgcggtgctgtccgagtcactgtgtggagcttagctcagcgctttgctttgagatcagccaggcaggaatatttacaccacagtaactggcaaacactgcacatgggcagccgggtgtcagatgggcaccctggcgctggagatttcactggccagacccccacccccaattccacaggaaacccaagagggacggtgctcaccgtcctcccctggtgggctctcagtccattcctgggtcacagcggcgccccacgcaggctgccccacagggactccaccctgggcgccatgctggcatctctcccccaagttcctgtgtcatgggcattaacacagtgaggacaacacctccaggcacccatgctgggcgtggagcatggatgggaaggccacaagtcctgagggccgcttgttacgtggcctggccccacccatccccacctccgtggtcagggagttgctggctgctgccgtagaggacgagtgattgcaggcacctgtgcgtctcacgtgtgatgccttcttaccaaactcgcaaaacctgcagagcctcgggttcccagcaagctgcctctgcccgccaaggaagagcattctggaaactgccgctgaggctgctgcgcttcctcgcccacactcagcacttccagcgtgaccacccctttgtccgggcggaccctccagtcagaggagccagggctcaacagaaacctgtcctgggcgtgcacccgaatgaaccgaaaacctgtattcacacaaaacccgggagtgaatgtggagagatgctggtgtgtaaccccctacgcgctggagagaactcaggtgcccatcaccggcgaggggataaaacagctgcggaccccccataccgcagaatcttgggggcaaaaggcacgcgctggcacttcacagcacaggcgagtcctaaacgcgcttttctaagtgaaggaagccagacaggccgcatcctgtgagacctcatttctgtaacattccggaaaaggcaaaactttggcgacagagcagagacgtaaatcggatccaaaaccagaccctgcagatttccgcaccgcctcagcctaagctgcgcgagccgaagcctggaccccgcaagtactcatggctcttctgccccggggtgtctgtgactccaagtgcaccctgagaagaagccccccgtcactcgtcctgggggcacagcagtaggtggccaggccagtgcccctgaccacacacactgaggacgctttccaccctatcggcttcctttcttggcgtggtggctcctgcccagtgactcacgcacagagagtggcaggaagccagggaggacgggctggcagagctctgagcgaggagcatggacaccagcttgggccagggcctgtggggcaggagaggccgagaggcagcgtgggctctgaggctgggccttggtcgcgctcgctcagcccggggcctggtagcagcagggacgtacacagacgtggaggggcatccgggcaggagccgtggacatgggagccccacacgcctgagagcatggcacgcacccacgtggccacgaggggccaggacgcagccggtttgcggctgaaccagaactgcagtcggggtgtcctgcattccctaggctcgtgctcccaccccctgcccacgagtgtctgcagaggaaggcggccctggatccagccgtggcagcagggggtgggtccggcagcccatgtccccgcgtggaggtcccgggaggtctggccccctgcagggcacccatgctggggcagtggatcccgagatgctgagctggggcaacaggcctggaggcgcggctctgcacccccagaacttggtctcagccctgagcttgccaggatggccaggtgtgaatgcggccaggctggaggcccaacgtcccgtgcagctactgagtcagccctgctcacctggaggctgctgcccctcgaggtactgttgtcccgagcccatagtcagtccccgcctggggtctggcgtctgccctgctaactctcctgtgagtgggctgggcacggaggctgaacgactgtgtcagcccctgcccctgcccctgcccctgcccccttaggcctccagggagctgctccagaaagtccaagagccagcaccgcggccagctggtctgtccttgcaagaggccgcgatacagccttgacacccaggggctgagaagggagctggggaggggctggagaggggcttggggaagacctggggagggtctggggagagtgctggggaggggtcagggaggggggctggggagggggttggggaagggtggggcaaggatctggggaagtgttgcggaggggtgggggaggggttagggagggggctggggaggggttggggatggagctagggagggagctgtggagggagctggggtgggagctgtggggggagctggggatgggctggggagggatctggggaggggttagggagggagctggggagggagttgggtgaggggcttgggagggggctggaggccactcaagtcaggacgaagaagatgccggtttgtgcggcggtgcagggagtgccctgcctgctggcgtgcccttgacacgcagacagggagaggctgagtggacttgatcagaacagcccctgcgggcattcacaccacctcctgtggtcacccctagtggaaggaaggcccagcaaggagaccttgacctcgctggccctggggctgggaccggcgccctggacagtgtccactctcccatttccatggaaccaccatcctctcgggcctccccagccgccagcacacgccactggagtagagccctgtgaggggcctgccgcgtgcagggggaggggtgtatcacgtggggtgggacgaggctcatctctgggcctggggccccagtaccgtcctcttagggcagcgagctgcctcccagtccccacgacctctgcttgggatgtggggcctgacccgttcctgctaccaaaacccaactcaagagttttcccagatgcccccgggacccataaagcctcgaaggaagccaggttggtgccaggcccagctctgtctcccacctgctaggtgcctgcttgggctgccccctcatctggaaggggtgctaagtgccaggacagcgccccaggtccggggcactcatgagtgacagcatcctccaggtgtggactacagggtagtcgggcaactgggatcctgctcctggcccagcgcagcggaaaggacagagccagaccctccagccaccccttccaggctgtctccttgtcctcagagtgggcagaagatccctgccctccccacctgcctgctgtggggtcagctaagacaatgggtgtgggaccctccacaagaacagccccctgttaacaaaatgagacttgaaggagtgagagcacttcggggggccgggtttgtcaggcagagattgcaccaggcagggggccgagactttggagaggacctggctggagcactcgtctgcacacaaggaaaacaaaggctcaaagacagggcagagttcagaccctccgttcccaaagtggtgccccccacccctcccaggactgtgtccacacagtggtgcccgccagggtgggcaggaggtgtccatggacatgactacagcaaggccaggggccgagagggaagggtcagggaagactggccagctcgaggggatcacagaggctgccctggccttgttcctagcggacaaaataggactgacagctacagacaaagccaggcacagcccagcacaaagacagacagccgaggaactgtggtgccccagtagttaagggccagaaagaacatttttaaagatgtcagggttggctgccagaatcctcttgtacaacattccatgactgggagttgttggggacttgagttccaggctggctctgcccagccttgaaagcctggctgggcctcggttgcctccttggaaaatgaggggctagactgaggccctgggggtcctggctgtgcccagagcctgccgtgccaggcccacgaggagaggtcagggctgggggtgccgagccagcttccccaggctccgggtcaggttatccaggtgggagggaggcctagcacctcccccactccgaggtctggcttctagaatctcctgcagaaacacaaacccatctcactacactgtaaacacaacatccttggaattggaaatcaatggcagatgcaggcagattcagcctccaaagccacagaagggctgggagcggaccggagccaggagttgccacgggaggtgggtgcctgggagccccagcacagaggtggcccctctcaggccaggctgggccgcagcatctgtgggcccctccacgccccctcccatccgtgctggccccattggcctgggctcgcagctggactgcttcctgggtggaggcaccagggcccacagtggtacggcctggcattggtgcaggcttttaagcatagatggcatctttaacaaaaatgggctctcacagaatgtttttaaattaaaatgtaattcacatacctcggaatttacctcttgaaagtccaggcagttcagcggcatccggtccacccccactgcggtgcagtgccagggtgagccagccacccccggcgggagaaacaccatccccacagccggcgctcctgtgccccctcctcccagccccgggcaggcctcgcctctgtgcgtttcccatggatgaggtcatagagcgcgtggccttccgtgcctgcctcttccgggcagcagcatggtgggtgtttctgaggctcctccgtgtcgctccacccgtcagcacttcatgcctctcggggctgggccacatttcgttgcagggatgggccacgtttttaacctgtccatcagcggacggacgtttgggctgattttatcttttggctatgatgaataacgcggtgatcaacattgattcacaagttttgtgcggacccgttttcagttgtcctgagtatcagcccgggcctagacttcccgggttatatggtgatacagtttaaacgcatgtccttgccaagcctcgtgttgaactgtcatcccccgtgttggaggtggggcctgggggcaggtgtttaggtcacgggcgtgactccctcaggaatggcttgagccatccccgtggtgaagagtgagctctcactctgggttcctgtgagatctggtgtttaaacgtgtgtggcacctccccgaccccgctgctcccgctttcaccacgtgactcgcctgctcccccttcaccttccaccatgagtaagagtttcctgaggcctccccagaggaagaagcccttatgctcctgtacagcctgcagaactgtgagccacttaatcctcttctcttataaatgacctggtctcaggtatttatagctccataaaaacagcttaacacgtatggtaactctgtgtctaagcatacaagattaaaaaaatacattcacaccgtcttctgtattgacttccatggttacctttactaatgtttttatttcttcaagttggtgtgagtggctgtctagtgtccttacatttcagcctgtagacctccttgtagttatctggtctgctagtgatgaattatctcagattttgtttaaaaactgttaaaaatattgatatatagtatgtatacacacacacatatatattgtatttatatttagaatttttaatatatatagttttatatataatacatggtatttatataattttatttatattttatcattttattttgtttatttatttgtattaatttctccttcactcctgaaggatagctatactattatacaattctcggttggcagtctttttctttcagcactttgaatatgtcatcctactgctttctggcctcatgacttctaataagtcatctgttaatcttatttaggattccttgtatgagatgagtcccttctctcttgctatttttagaattctctccgcttttcacgtttcacagcttgattatgatgtgtctgggtgtgggtctctctgagtttattctacttggagtttgttgagcgtctaggatgtgtagattaatgttttcatcaaagttgagttggctgttattttttcaaatattctttcttcccttgcctctgtctcctctccttgtgggacttcatgatgtgtgtgtttgtgtggttgatggtgtcccggaggtctctgaaggtctctgttcatttttcatcattcatgttgttttcgctgctgttctgtttctcaagctggacaggctgacctgtcttctagtttgtccattcttctgcctgctcaaatttctggtgagcccctacaatgaaagcttcatttgagttattgtacttttcacctccagaatttttttaaagaaataatttacatctctttgttgtattttctacttggtgatacactgttctcatactttcttttagctctttatacatagtttcctttagttctttggacctatttaaagcaactgatttaaagtctttgtccgtaactctaatctctgggctttctcagggacagattctattgtttgcttttttccccatgtttgagacttcttaaaatttctttgtatatctctaaaactcttttttgaaaactggacatttaatataatagaatgttgtaattctagaaatcaaattctcttcccttccccgagtttgttgtttctacttgttattgttgttatttgtttagtgatttctggacaaattctgtcgaatctatattctttatcatgtgtgcccactgaagtctctgctcgcttagcttagtggccatcgaataattgggcagagatttccttaagcatctggaactgaagagtctccgtctatgctgaggagctccgtacagtgatggggcatgccgtcaacactcagccaggcagctgtcaactctgcctcagccttcactgcctgcctaacgattagtgggagatgagcacgtgtacagccctgggcatgagcatggcctttgaggttcccaggagtatgcaggagcttttcagatctccctatggatgtctcattcccccagattttcctgttaaacatttttgttagcctatttccccccccaacctgttatccactgcctcaggcacctgcaatgttaaataattgcctggttttttttttcttcttctttttaacaaatgcccctgggctgttcctacgggttaagctccgagtcaatcaggcaaagatagtcttgcaagtagagtcttccacggaacagagaggcagctcagataatgacagttctccgggaagaggctttgggggagctcggcttcagttctccaccccagtggctgctaggatattgcttttcactgaaatttcattcctcactgcaaatctttggttaatttccagaggtctgaaaaagccgattctgatcatttttgccagcgttctcattgctttcatcaatgaggctttttggacgtccttatcctgccattttgcagtcgtcattatctagaattttaaaaacagaggtaatactgacgtgaaataaacacacttctaaagcatgcaatttggcaagttttgacatgtgtacacttatgaaaacatcatcacaatcaagataacgaacctatgcagcacccccaacattccctcttgtccctctgtgcaaccccatcccccttctgctctccgagtaaccccatccccaggcaaccactgatctgtttctgtcactatagattagtttgcattttctagaaacttgtatcagtggaatcatccagtatggttttttgttgttgttgctgttgttgttgttttggtttgtttcttttggtctggctcttgtcactcagcatgattattctgagatccgtctgtgctgctgtgtggatcaatgtggcatattcctattaggattccatggtatggagagactgcaatgattattctgagatcaatctgtgctgctgtgtggatcaatgtggcatattcctattaggattccattgtaaggagagactgcagtttgtttaccggttcccctgttgctggatatttgggctgtttctagtccgtggccactgcaaacaaagctgctgtgaacattcgtgaatatttgtagacaagtctttgtatggacgtatatgctttcatttcccttgacaaaaaacttagggtcaaaggtctggatcctgtgggaggcatatcattaactttttttttttttttttttttgagacggagtctcgctctcccccaggctggagtgcagtggcgcgatctcggctcactgcaagctctgcctcccaggttcatgccattctcctgcctcagcctcccgagtagctgggactacaggcacccgctaccatgcccggctaatttttttgtatttttggtagagatggggtttcaccatgttagccaggatggtcttgatctcctgaccttgtgatccgcccgcctcggcctcccaaagtgctgggattacaggcgtgagccaccgcacctggccacatatcattaactttttaataaactgtcaaactgctattaaaagtggctgttccattttctgcccccaccagcagtgtcagtttctccacatcctcagttatttgatatcttggtctgctcatgctgctctagcaaaataccacagaaaggcggtgggggttaaaccacaaaagttaattttcccaccgttctagaggctggaagtccctgaccaaagtgctgctagatttgattccccgtgagggctctctcctggcttgttgacagccacctccttgctgtatcctcacagggccttcacaagtgcacacatgcagagaaaaaagagcaaactctctggtgtctcttctcataaggacactaatcctattggatcagggccccacctctaggacctcattttaccttaattgcttccttagaggcccatctccaatacagccccactgggggctaaggcttcagtatacgaattttggagggacacagacattcaaccatgacactccacatcctcatcaacacttgatactgtcagtctttttcattttagccattttaatgtgtggacagtggcattttatggtggttttaatttccgtggtaactaatgatgtcgatcatcttttttttgtgttttgatctgaatttctatgtcttctttgagggattttctattcaaaacttttgcccattttttaatggtgttattagttttcttattattgaattttgggagttctttaaggcatgctggagtcttatcagattcatcatttgcaaatattttctcctgctttgttgccaatctcttcattctcttaaacatgtcttttgcagagcagaagttttacattttgatgaattctagtttattcatttattttggcgttgaatttaagaaatttctgcctaacctacaaagattttctcatatgttttcttctggaagttttatagttttaggttttacatttagatctataatccattttgagttcattttttatatggccctggggtatagatcaatgttccctcttccatgtggctattccgttgttttagcactgcttgttgaaaagaccctcttttcttcactgagagtcttttgtcaaaaaccaattgtccatgtgtgtatggctctatttctgagcattttataaacacactgtcttggttactacagctttataaagtctaaaaatcagctagtgtaaatcctccaactttgctcttatcttccaacgatgttctggttgttatagggcctttgcctttctatgtgaattttagaatgagtttgtcaaatcctcttcgaaaaaaaagccttttgagacttcagttgggattttgctgaatgtgcagatcaatttggggataacttctgtcttacgcacatggagtctcagcccatgaagatggtgtaagttttcatttcttatgtcctctttcgtttactcagcaatgttttctcattttatgtgtacaagactttcacaccttctatcagatttatccctagttcataattttgatgttacgacaagtgtgttgttctttccattttaatttctggctgtccgttgctggggtatggaaatgcagtgactcttggcattgatcttgaccttgcaaccttgtgatgctcactcttcagctccagcagctttttgtttcgtgaattccattagatttttttgcatagatgaacttgtcttctgcaaataaagacagtattattcttttcttcccaataacgatgcctttcattttcttttttccttcctaattgccctgactagaacctcctgtgcaatgctgaatgggaccattgagagtgctgtccctgacttgttcctggcctcaggggaagcactcagtctttcacaagtaggtgtgatgtcagctgtcgggtgttcagagatgccttttatcaggttgaagaagttgcttctactcctgtttgccaagagtgttttgagaatgcatgttggaatttgtcaaatgctttttctgtgtctattgagacaatcacattgttcttctttcagtttgttaatatggtgacttaaattgatttttacgtgttcaatccttaagacaatcctgatatattggggaaaattctccttggttatgatgtatcatctttttaatatgttgttgggttcaatttagtaagcttttgtttaggacttctaaagggggatgcttgttcctatattcttctcctgtaatgtctttggttttcatatcaagatcatgctggcctcctggaaggacttgagaaaaatccctgcttttcaactttctggaagagcttatgtagaattgctattagctctttcttaaatgttggctggagctcccctgtgaagccgtctaagcccggggttattttgtatgtgagaggggaagatttttaactacagattcaatttgctcatcagccttctgctgcctctcaggggccctctgtgcctttccagggttctcgctaggtgcagctcccctctctcaccctctgccctgcaagctgtggctgccttggtctccccgactctcagcgtcctcaactcaggagatccctggctccacctgcgtcacctcccagcactgtgacctggaaactctctccgggaggtcggccgggccctcagagggctcatcgcgtccgtgtcccatttctcgggtcacggctcctttttgtctgatgcccattgccttgaggaccctggtttcaatagtcttgtctcttatttagttgttttgggcagataagtacattcagcccctgtcactccatcttgtctagaagtggaagtctactgtcttttatttctttcactagaatagtaatttaatacatgtttattgtaggaaatctagaaatacaaagatacatgaagaaaatggtaggaatcacttatagtctcaccgacagctaacacgtttagtgttctcaacagcacaatattctccatctctgctgagacccatcccagcagaggggtgcccgcacggcgaggccggcacaggcccgcgtgggacccactgccaacgccgaagccagggtgtgacctctagctgcagggccaaggcactgaggggcagccccactcacccctccttccaacctctccagcaacaatcggtgagccccgaccctgcctggaaccctggggccaggtcgtctgtctggacagcggcctacagggaacgcaccagaaggtgtggtggggtggtgcctcccaccaaatccaccaaaatttgaggagcagccgcatcaagcccctttcattgcacgtctgaatccccacgcgtggcgtttccttagaggcaatttctgaaaaagggatttctgctcaaagtgtgtgagcctgtcaggctctgcccagtatgccaagtctgcaggaccgcgtcacatttgaccagataattatttgggaacagcacccgcatggagcagccccacagaagcttcgagcccacacctgggttctggcccattgtgttcacgccccccacaccccgcccgaccccagctgccgcaggagggccggctgatagaggtggtgcagacattggtcctcacagccgggcagccttgaggggaccacacaccgccccgcccagggcctccagcacctcggctcactgccccggttccagcaggaatgggggccacacaacccgagaaacacagaccacgccactgccgagctgcacgagcttcagctgcaacaaatcgccacagagcaggcagctgcaacatcagaaatggacgttctcacagctccaggtccaaagtggtttcactgggcacaataaaggtgtaaggtgtctgcaggactcctcgaggctcctgccgcctcagcccccgcgctgcccccttggcctccctctcgtggccagcagagcagcacagcgctggtgacacgtggtctggtggggcagacctcccctgctaagaacaccagaggcgcctcagtcccacccggatgatccgagataatcccccgtctcagggcctctcactgagtcccccctgcaaacattcctgccaggtgaggtcactttccagggattggggcccggacattccagggccatcactcagcccaccacacagtgaaagcacaggatgcagtgtcacaatcagaccaaagaactgttccttagctcctcttaggggcagaatagagagcacagggctgaggagtggccccctcatggtccccctatctcacctgcctcaggtcacctccagaccctttaacacccaatggtgacatttcagaggcaaggaacagatggacagaaatcagggatttgtgcctgcagggagtggtgggcggggttcagggctgagcgaaggaagctccggcagacaggtcctggcaggaggctgcagagaggaggcggcacctgagcccgaagggagcagctggggaagaggtgtctggatgggacatgcctgccactgacccaagtctgttcctgtgggttacccatttcccacgtagacttcttaaggatggcagcctgggcaatgcccttgtctctgtccccaacgcacacctggaactgaggggggaacgcatctgtagtgaaaggaagagaaagagtaaagctgcagcaactcttggagggctgaacctgggagcccagggaggtgaaagcagatggaggccccagtcctggggaggtgaaggcaggggcagaggggccttgatggtggtggggcgtggtgggggcgttgcagaaacagcagccaggctggtgactctggggactccccctgcagggagagggaggccccggctaaaggccaaggctgccccgcacccagcgagctgtgcaaacagccagcagaaggcccaccggccctctggggacagagctgaactcaccctgggctctgcagtaccaccaggggcagcctgctgctacagggcgggctcacacctgggggagctgtgggcaagcaggccctaccttgggggctggcactgctgtgggtcccctggctttcacagaccgaccactcatgccaccggcaccaagcggacctgggacctgcacgccctcggctcatctgagggtgatactgatgggctgtgcaaggtccccagacgctgatgggacctcgatcccagccagtgtcagggctcttgacaccaccgcgagaaggaattcaaggacaagtccgaaaatagtcaaagtacagagatttattgcaaagtgaaaagtctacactcaagaggggagttcgcgtggactcacaagacagtcgcgcagtgaggtttggggctgctgcctttatgggtttttttttaaaccaaggggcagagtccaagaagattcctggaaaaaggtggagatttctcagaactgtggtcccaccagtttttactccaaacatgggtgttcccagaactgtcctggcacccatgggtgtgggatttaggatttttttttttttttttttgagacagagtctcactctgttacccaggctggaatgcagtggtgcgatctcagctcacagcaacctctgtctcacgggttcaagcaattctcctgcctcagcctcccgagtagctgggattacaggcatatgccaccacacccagctaatttttgtatttttgtagagacagcgtttcaccacgttggccaggctggtcttgaactcgtgacgtcaggtgatctgcctgcctcggcctcccaaagtgctgggattacaggcgtgagccaccacacctggcctgggatttaggatgttaatgagcgtatcatgaggtcctaggtgaaacccgggtcaaatccagcaccggggtgggtccagttggtcttagccagctgggcccgcactctggttttcagggtcttacagcctgaaatctatttcaacagttccctttggctggtcctggaaaactgctgcctggaattttctatcctcttgcaaccaccctgtatgattcctgtctcaggggatctgaactcctgttcccagggggaagacagcaggaagccaatacacacacacactgtgggcagagagaaaccaagtggcagaggggagagagacaagaggggccgcccccgccgagcagggcctggttgggggaggagccactcggggccctgggcggagacagaaggggcagcaggtgcgaagctggcaggttcagcccgggccaggggagccgagagaggtgcggcgaggggcagggaggcaggaaacagtgtgccaggcccctgggccttgagaggggttagggttgaactctgagtgcaacaagaggcccaggaagtttccagcacggaggcagacaggacctagtgtgacagcgaggctcccatagtgccgtgcgccagctagcattataaggactttgcatttattaactattcttatttcaatgtacggaaaaggctgaggccagacgcacaggcagctgcgccaggctgggactccccactggcagccaccatggggctctggaagcccctcctgtgctgaatggagagccccaggatctttgctcatctcaatctttgtcaattcttccgacacccctcacaaatgtgagtggttggtctaagctggtcacagtgggagaacccctggctttggggattggctcacggtggtccaatcagcacaaagccctgttgcggtcacagccaccccaagatgggaggggcagcgtgggcagagggtggaaatggccccccatctcaaccatcccacagccctggatcagccatgcctgaagcccctgctgccctgagctgcccagctctgggagcagtgaaggttctgggagccagtgaaggttttgaggggtgggcagtgtgagaagaggctcctgttcgttgcacctggagcatcctgaaggtagcaggaaggttgtagaaccgggatggggccacaagacaggaggaaaggaaaagcaggggaggggaggggcagggcaggggaaagggggccgtggaggtgctcggggggcatcaggagcagaatccacaccttgtcacccccacagcccccacctctgcagatctccaaggcttgaggagcccctcacactcactgaatgagccctgaggacccctgacggggcctccagactcagagtcctgtttgtggggccacggcccagcctgcccttgctaagtaactctgaactcgatttagacactggggaaggattctgaattcagtccagcgtgaatgcagccgtgaggccagggtgaggcggccctcacggtggtgattgcctagaagtttcttatgaagcagcacacacatagtgtgaccgtctatatgggactcaaaacaggcagagacacccgtggagacagaggttagagccacagccacgtggccagggtggtgtggacctgtttctggatctgccgctttaaagtgtgtgtttggttcgtgaacacttgctgggggtccacttacgctttgtgaaactgggctgggaacctcaccttgtagaagctgctggaagcagaacacagcatccctatgagggggtgtgcaacttttagggggctgtgtcccacagcacaatgggtaactcatttgtttgaaagctgtaaggcaaaacacatttttttctttgcctttttgttggtagtctgcataaactcagctgttttctagaagtcagcaaatagccatccgtttccctccatgatgccaaggggccagatgttcggggaattgcccagcagacgtggctgcacccctctgagagccagcccaacccagctccggccttggtggctcctggtggaaaagcctctgcccccaagcgtccccttggtccaggagaaaggcggaggcagcccggctgctcatgccagcacagcctccatcaaattaaacattctatccatttacttgatggatgtttgaccagaggaatccaaaatttaaatgtaagcagtgagcctgctttaaagtgaatggctcattaggaaacaaagcatcccatgagatcaatacttggcttctgagctctgcttttctgaagggatcgctaaacgccagcaggcaggagcagccaggagctccaataccttggagggggcgttgagcaggcatctgcaccagctaggttttggggtgactgcaccccttgagttgtgcggctgggtgtcttctggtgacggacaagcatgcttctcactgtgggagctgtcaccatcgcacacaccaggccctgttgagacgtcagggcagtaacagggaagcttcctcaggctcagaaggaacagatgggccctgtcggggagtcggggagtcagggagccgaggccagccatggaagtcctcagccagggagggtccacatctgggggaatcatgcccaggtgtgaggccctgggctggacaacagcagagacaggatgacccaggggtggtctgctggtcctggccctcgtcccctgctgggaggatgtccagttaggcctggagcagtgccagaccgtccaccgcagccagtgggggctgctgacgaggatgcctccgatgtgtttatccacagtgtcacttcctttttattataaagggaatgtgtttccttttgggaacttgagaaaatacagattggcaaaatgaggacaatgcaaatcgatcgtattccagccactcagatacaatgactgttggtgtttattccactgcgtgacatttcatctggacatggggccccactgttggtgtccatcactgtgcaccatccttgtgaccggatgctccacgttccctgcgtgcacacactacaaagcccagcccgctttgtagacatttggttatttccagattctcactattgtgaataacacagcaatgaatactgtggtgaccttatgtcgttcatctgcctaatgtctatttggggaccctcccccaactcttggcttggttggggctggtcccactcccagctccaggtgtgggtgagtcaggctgggctagtcagagcctctcaccctcctagtcacagaaatggggttggggatggttgcgtggcctgagccaaacccatcagagccctcccagggcttctgccgaaatgcagggaaggagacaccctctgttactggagcttgctggcccccgaggggacctctggcccaccatgggggagagccaagctggaaagtatcagggctgtaagagacttgagtggataggacttgagtggacaggacctgagtggacaggacctgagtggacaggacttgagtgggcagctctccaggggagacgtggagatggccagttggcacatgtaaagatgctcagcacctgtaatcaccaggggagtgcagggaaaagttacacccattaggatggctactattaaaaaaaaaaacaaaacagaaaatgacaagtgtgaggatgtggagagactgaaacccttgcgctctgctggcggagtgtaagatggtgcagccgctatggaaaccagtatggcggttcctcagaaaattaaaaatagaattaccataggagccagcaacccccttgtgggtctatacccagaagaattgcgggtctggaaaagacctttgtagcccatgttcacagccgcgttgttcacgttggctaaacgccggagcagcggcgcctccagggagggtggatgggtgaacacgatgtgggccccacgacagcaggaccgatgcagcctttgaaggaagggaattgggacgcagctgccaggggtaagcgtcgggccacgaaggccacgggcctgggtctcgcgtggggccttcattgggaggaacagcgaagaggccacccccgccctcagccgttcgtgcacttggtccaggcgggacccggcaggacccccagcagccccgggaagcgcccggacgacggcacgggggccccagggcgccgcgaaggaagccccccgagggcgaggccgggcgaggccagggggccggggccagaggcggtcgcggcgggggtgggtgtcctggagcaggagcggcagcgggaaacgaagacacgcgcttcttcctactggggggatggctgggaagtaagaccggccgggccgccgagcccgctgcgaggggcttcgcgtggcggccgcacctgagcccgagcgcgcccttgagaggcggcgcccacgggggcagagacccacggtccacgcgcagacccggagaacccgcgatgtcgccgcacgcagcgccgctgtgaaggacggaggcggggcggggccctgggacagggagcgggtgggggcggggtggggggagggcccgtccgggcctgcgcgggaagccctgggttggccttggtgctctgtgatgcccacgctgggtgcaaatgttgctttggtaaaaataacaacaacgaaaggaaaagccaagccggaccagccccacccgcagggccccggccccggccccggccccgcccttggactcttccccgccccacccccacccgtgggcgagcgagcccggaccgtgaagggagggggcggggcgggggcccggaggggcggggaggggccgggtcctcccgcgcggggtcctggaggtcgcggcacgcgctccctgcaggcgaccctggggcgcgtctgtcccaggcccgggcaggacccccgcccgctggttgtctgcgcggctgccccgcgcccgccgcccccggccgctgtcgcgcgttcccagacattctttgggcccaaggctccgggcgttctggcggcggcgctgggaagaggccgggcgccggctcccacagccgggccctgtcccgctgggcgcgggcgatgccattcgtcacgctctattattgtaggcagcgcaccccggggctcggttcccacactgcgcctgaggcctggggcctgagcgtgggccgcacccgccgacctggggggccctggagggagcggctcggaggggcgccggtgcctgggcaggtggatctgggaaagatgccactgttcctgccacgtcactgctggctgcagggtcctgaggtggtggcggtggtccgtggcctgtgtcagctgtcatgtgccggctgcagggggcggacaggccaagggacccaccccgactttacgattagagtgttgggccaagggtttctctggttaaagacctgatgaccctcccattgacagccacggcccagccaagaccagcactacgcatcccctgggcacacaccccggtgtcaggactcaccatgtgagatctaacctggcgggcgctatttccagccacactggaggtcggagtccagactcagtttcctcacctgggagaccgcatggtagcaccctctccagaggtgtctgcatggcgctccgagaagggcctggcacccctgtctatggaagcatgtttaagttctcccatccacacacagaatgccgctgcctctgctgccacagtcgcatgacacaaaccacagttacgggacctggactctggagaaacgcagagaacccacggggcctggccctccgccctcacgagctccacaaggactcagcggtgacctgtgtgagtgagagtgtgtggtcccatcgggacaaagggagccacgtggcccactcttgggctggaagacaggaaagtagaactgttttcccccaaaagtgagcagggcagccacctgcctggcaacacgggttccccacactgggaaaactgaggtcaatcagttcgacctgtacctgtgccacagccactgtctctgcagacccatgggtgcgacctgaacactaggaacaggcctgtgccctgctccccagtggaggtgtctgctcccgcctgtgcacactcagggtcagttgtcatgggggccatctgatcactgctgctccttagcagccaggacaagcccagggacgctgcacactgccaagcccacttcatgcaagtcctggccggaagtccatgcgattcatgcagaattatgtccccacccccacccctcccgcagcctccacagagcctgacctgagctgtgggcggtcactggggagcagtgaccagaaggcacatggtctatgcccagtgagaccccagccactgcctgccttctctttccggcgggtcctgggaccacctcccagatagatgacttacactcaaatcctggacttgagatctagttctgaagaaaccaaaccaagatgggcaaaacgtccacaaaaagagaaacacgaatagccaacaacgacatgaaaaatgtttaggaatctaagagagacaaattctaaggggagatcgtatttcaccctccagactgacgaccttcagtggcgtggtaagaaagccaggcgtggcgaggccagcagcacaggatgtccgcgcctgaccctcccacgacccttcgggaagtcttttgggcaatatgaactgaggtcatcagaaacatgcgtttctgcatctcagcaatttcactgtgatgatttaccccaaggaactaattggataatcgtgcaaagagattcaggtgtgtataagatactcaatgcagggcaagggccagggccagggatggctctatcagcaacgggggaagagggccaggccgagggaacatcgggaggccagtgccagcgggaacccgtgtccctgtgcctcacagcccctccccagactgtccagccagtccaggaatctcccagtcccccgtgatcctggccatactcccctgggagtagcaggaaggtggccgaaaaacacaaagccacagccaactccctgcaccagctgaggtccagtgatctcggacacacagggcactgagaacgtgggctggacggacacgtggccagctaggcccaggacagcccggacatgctgccctcttgggtctgattctcctccctgggacttcagggtaaataagaggccagaggccctctctccactgggatcgcctggcggaggggccacggccctggggctggtgggaccacaagtgaggctggcagggagcctgtaaagtgagcaggacgagaatcctctccacagaacagtacgacgccgaataaggatgctaatgtggcaaaagctctccataaacagtaagcgctgagtgtgcagaaataattttatttttatcatcgcgtgtcctgctgtgctgatcatctgactgcacgttgagactgtgcttttccgatctctcaggtagggtggccctaccaggatcactaacccatgagcaggacaggtgtgcaagagacccctgctcactccagtccccgctcagagaaccatggccccagcagggtgcacgtggcctgccctttgatctagttgtcttggccgatgacacaaggtcatcattcctcagcactgggttgccgcgggaacagagaggccaaggccaggcgagtgtccgtcctgtccagtgggatccttgcagcgaccggtggagcctgtcagagccctggggccaggccacccaaacgctgtgaggtggggacaatgatagaagggccagcacagcactcactaagagacaattgtagttcgtacatttataaagaaaagccggcctcacactgtgcacccaccccgtgacaagacgctttttcgtttatgtcatgtagccatcgtgcagagcgtttctcccggggcctcgggatggggcatcgttgatttcaccagagcccccgcaccccatgtaagggggcagaaggccatgtgtaagggggcagaggccttttcctgcctccacctaccacaccccaggtcccagtggggagccctcccagcaccaggggtcttacacacacacagaggacttctatttatggcagatcagggaacttggttcccttcccatcactcccactggaagcagaaagtgctgagtgaaacacaaaacacacacagtgttttctcagacacacgagtgagctggcaggtgagaaatgaactcagaagctgtagctggcgcgtgggcaggaacctggagggctgaggggagctctgggctggctgggcctgcgagggcatttattggattacaaacgtgaacttgagcttggcctggaggcccgggtggaagacggcacagctcagggcggactgaagaagggcagtctggagggagaccctgtccacataaagaaccacaagaggctgggctagaacagcattctctggcccccacccctgggcactatccctgatttgggcacggagtggaggagaaaccctctccctaaagatttgtgaccacaagctggcactcatgaggtcagcccccaaaagtcacacaacctgggggtccaaagcccaggatttaatgtgagttggtttgagactggtcaggattgcagcaaacacaagttctctgtgggagaaaccaggtcaacccacacctcaaggcattgccgcacacatgtggacccatcgcggaaactcacaaagcacaccaggactcaaggcacatggcgagctggaagcacacaggcagcagagcgtggctcacagatcctgcagctgtgggatttccagggcagaggatataactcagatgtgcttaagtaagtaaaaaagggatttaaaataatgaatatagagtgtgtgatataaaaatatgataaagccaaattgaaaaaggccaaatagaatttctagaaatgaaaactaaataggtcaggcatgatggctcacgactataatcccagcactttgggagactgaggtaggagaatcacttacggccaggagttcaagaccagcctggccaacatggcgaaaccccatctctacaaagatacaaacattagctggcacggtggtgcacacctgtagtcccagctactcaggaggctgaggtgggaggattgcttgagcccaggaggttgaggcggcagtgagctgagatgacaccaatgcactccagcccaggtgacagagcgagaacctgtctcaaaatacataaataaaaaataaaagaaatgaaaactaagtggattaaaaatagacgaaattgaaaaaaaattcagtcatagtaacactttaaaaaaccctcaatggatagatttaactgctgttagatatagttaaagaaaaagctagtgaaatggaagattaatctgaagaaataatctctaatccaacacagagaaacaaaaacatggacaatgtgaagagcacatggttcatagaaaagaaagtggcaaatatgtacagctaaaccctataaagcagacaatatgaaacaacacatggactgtctaatggggctaagacaataaagataaaacaaaatacaacacacaagcgtgcatggagcaggggagactgactttagactggaagggtcagtaggcagtgaaatgaccaagaagacaggaagggcaggacacataactttcacactcattcaggggaaggaatgagggaagtgtgatttattcaaagaaagcaagaaaggagagaaaaaaggaaaagagaaggtgagatgactatacggtataaaacagacagctgggtgcagtggctcatgcctgtaatccccacactttggcaggccaaggtgagcagatcacctgaggtcgggagtttgagaccagcctggccaacatgcagaaaccccgtctctactaaaaatacaaaaaaattagccaggcgtggtggcgcacacctgtagtcctagctacttgggaggctgaggcaggagaattgcttgaacctgggaggcagaggttgcagtgagccgagattgtaccactgcactccagcctgggcaacagagcaagactccgtctcaacaaataaataaataaataaaataaaatctgaatcatatgtcatatcttagtggtgaagtcttggaagcattccccctttttaattctcatttgattactttctttttcttcaacttttattttaagttctgggtacatttgcaggatgtacaggtttgttacataggcaaatgtgtgccatggtggtttactgcacctatcaatccatcacctaggtattaagcccagcatgtgttagctattcttcctgatgctctctctcccctcatcccgccaccaacaggaccccatgtgtgttgttcccccgatgtgtccatgtgttctcatcattcagctcccacatataaatgagaacatgtggtgtttggttttctgttcctgcattagcttgctgaggataatggcttccagctccatccatgtgcctgcaaaggacatgatctctttcctttttatggctgcatagtattccatggtgtatatggatgacgttttccttatccagtctatcatggatgagcattcaagttgattccatgtctttgctattgtgaatagtgctgggtcaattggtgcttctgcctgtaggtcttcaaggaatcgccacactgtcttccacaatggttgaactaatttacaccccaccaacagtgtaaaagcgttcctatttctccacaacctcatcagcatctgttgttttttgactttttagtaatagccattctgactggtgtcagatggtatctcgttgtggttttgatttctctaatgatcagtgatgttgagctttttttgtgtgtgtttgttggccccgcatgtatgtcttcttttgagaagcatctcttcatgtcctttgcccactttttaatgggattgttttgttttttctcataaatttgtataagttccttttagactctggatattagacatttgtcagatggatagattgcaaaaattttctccccttctgtaagttgtcttttcactctgatgatagtgtcttttgttgtgcagaagctctttagttagatcccatttgtcaatttttttcttttgttgccattgcttttggcattttcatcatgaaatctttgcctgtgcctatgtcctgaatggcatcgcctagattttcttctagggtttttatagttttgggttttacatgtaagtctttaatccatctcaagttaatttttgtatatggtgtaaggaaaggatccagtttcaattttctgcatatggctagccagttctcccagcaccatttgttaaatagggactcttttccccattagaagcattccccttaagatcaggagcaaggcagggtgcccactgtcatcattctagtccacactgtacaaggcctaggaaagggtcacaggaaagacaagaaaaagaaatgaaaggggcttaaaaagatagagtgtccatttctagatagaatgtcaacacaccagggctgggatcaggggctccaccctcttatcctgctgtgcagtcgtcctcaatatgtggttgctaactcctagtctaggatggccgcccatgtgccagccatcatgcttgtcttccagccaaccgtagagaggtaaatgaaaaggaggtatacctccttctccctgttaggacattactagtgaggcctagaccacttttacttccatcccactagccagagtataattgtattgttggagttagaatccatcgtttctggatggcccaagtccttaacaaacggaggatgggacgggggaccattagctcagcctggagacaaacacacggaactgaaggaaaagcccaggcagtgggcagactggtggccaagccaagacctgaggtcctctctccctgcggggagctgtgctgggccgccattgtctgccaccatccatggcctgcgcaggcctccagcccctcggaggctagttcaggaggctggggacagccttgttcgttgatggcacctggagcaacgtgaggggtgcatgagcactggccgggttgtaggacaccgagtgacgttgtgccccagcgtcactgggagagatgctggagcagcggttttgccttgcggagctgtgtattggcggggagggcttctagaaaatgtgcagagcacagttggattttgttataaatttcagcagggatatttttagctcaaggactcaggagaaacctgactgtgcagccccaaagtcccgaaggtgccgtcatagcctggacaccggctgcacaggctccactgggtccaggcagccgcctttgggagggccaagctctaggtcttgaggggagttgaggccgcacagctcctgttatgggcttcgtgcgccctggaaggttttccctgctgggcacagggaccgctgggccacagtgaggcactggctctacatttaagccatgaggatgttggggctacacttgctgcagaaagaaacagacattgcgcaggggacatggcactggagtctggcctgcgctgtggctgggtgacagcgcacaggtcatcagggcctctggagtggatatggtcattcctgcaggggagaggacagcgtgagacgtgcccatgggaggcacctgtatttcactgaacgcctttcagacagtctcagagagatggaagagctgacagcgtcttccagagggagtggggacggggtggccatctggcggccacgccgggccttggctttcttcgagtttcggtagaagaatcctctgaccccaccacaggtccagcccaggcagggtctctgtgatggtggagccaggaggccgtgaccttgcagatttctcctcaagctcatttgtaaggagggagtggccagaggactggaggatgttttgccatggatggggcctgcacaataaataggcagctcttggaggaaacgtgaggtttcatccagcagaccccccaagccactgcatctaacgtctgtcctgcagctgggggaggggtggtgaactcgtcctgtcacaaggcagggaccaggcagtgaggaggtgctccgggctgggtgccgagagagcgggtccttctggaaagggctgtggacacagcagggaggctgggcattcaggttaaagtcaaaccagaccagatgtgcagagactctcaggacggacagagggtcacacagacacaggggcaggagtactgagctggggcctccccaccaagcagggtctcgggccgagggatcagccctggcaatggagcacgtggggagagtgcctcctccctgcacacatgggccctgagtccacaggggccacaagatccccaggcagtgtggccctggctttcgggacctggggcctccccaggcatgtacaccggaatcccctgagcaccgccaacgacaggtaccccacacccaggagggcatgtggatgaggagaggggctcaggcagggcctttgctgaaacgcccaggggttaagatttgcttgtagataaaaaaatccctattctaggaacttacctgggatacctatccattaagatatgtgcccctaatactgtgtcaacacctcacctcatctttgtggagggtccttgccccctgaggagaggggaagagttgagctgggtgggccagagccccctgtactcctgggtgctccccagcctacactcagctctgggtcctgaccctgtctccctaggcagccggttgcatcccctctgtgcagaatgtgaacccccaagcaaggccctgctccccctgggccccagaagcccctgggggccatagggtcctgaggagtgaccgtctgtctgggggtcacagcgtcctgcggagggaccgtctgtctgggggtcacagggtcctgaggagggaccgtctgtctgggggtcacagggtcctgcggagggaccgtctgtctgggggtcacagcgtcctgcggagggaccgtctgtctgggggtcacagcgtcctgcggagggaccgtctgggggtcacagggtcctgaggagtgaccgtctgtctgggggtcacagcgtcctgcggagtgaccgtctgtctgggggtcacagcgtcctgcggagggaccgtctgtctgggggtcacagggtcctgaggagggaccgtctgtctgggggtcacagcgtcctgcggagtgaccgtctgtctgggggtcacagcgtcctgcggagggaccgtctgtctgggggtcacagcgtcctgcggagtgaccgtctgtctgggggtcacagcgtcctgcggagtgaccgtctgtctgggggtcacagcgtcctgcggagggaccgtctgtctgggggtcacagggtcctgaggagggaccgtctgtctgggggtcacagcgtcctgcggagtgaccgtctgtctgggggtcacagcgtcctgcggagggaccgtctgtctgggggtcacagcgtcctgaggagtgaccgtctgtctgggggtcacagcgtcctgcagagggaccgtctgtctgggggtcacagggtcctgcggagggaccgtctgtctgggggtcacagggtcctgtggaggggccgcctgcctcttctggcttctggaggtgcctggggctccttggcttgtggccacactatccccattcctgcctcttagtctctcataagacttgtcattggatctagggcaccctcatcccaagatccttaacaggctggcgtggtggctcctgcctgtaatcccagcactgtgggaggctgaggcagacggatcacctgaggtcaggagtatgagaccagcctggccaacatggcaaagccctatctctactaaaaatacaaaaattagccaggtatggtggcgtgtgcctgtagtcccagctactcgggaggctgaggcaggagaatcacttgaacccgggaggcagaggttgcagtgagctgagatcgcgccactgcactctagcctgggcaacaagagtgaaactccgtctcaaaaaaaaaaaaaaaaatccttaacataatgacctctgcaaaaaccctatttccaaataagccacattgacaggttccagggttacggtgtggacatcttgaggggtcaccattcagcccactccagaggggtccattgagctgggtcctctgcagggctgtggcctgtgctgggtggagacagtcctggggtgctggaggcaagcggggcttcactcagggctgtatctggctgcctccgaatcgcaacagaagctcaacaagcctggagctccctcagggggctcagtggcctctgagacctcccatcttccattttcccctagagctggccatgcctggggactctgaccatgggccccagagagcgctgctcccctttggccagcgacagggtggccaggcccaggatctggagggagaaagctgctggccttctccagggtgcagcctggagcttccctgctcttctgcagctgtgctcagctacgctccagggctgcgctgatttccgctgtcagtgacttaagccagcgtccacggccaatcagcacagcacttctgcctgctgcctgctgggttcagaccaggctgggtctggtccctgacggaggatgcagttctcatccttcaagcacaagcctacaggcagccccttgtcaccgagcgtgaccctgcctcaaggcctcctcctccctctcttgagtgagtggagcagagctggccgtggcctccctgcctccgctgagcccaccaccagtgggttttgttcggggctaatgaggcgcgggaaaggcggaaggtgccggcgtgacagctcagaagatggaactaatgagaccttgttgctggacaaaggtggcattcagggtgtccttttggcctcggcccccgactcccaaacgggcccctctaatcacagatggttcccggacctgtcccagcaaagggtcctgaagccccggctttgctgtgcagaggctcctcccaacctgggtttagccaggcgcctcctcgcctgccccaccccctgcatctggtcacctcacccctccaggcgcagttttgatggagaaaaccagacgctgtgggagcccaggccggcgtctgaagtccgaggttccaggggccacagagccccggcctggactcacaggggaactccctcacggcaggtgggcctcctgggtctttgtcttcctcatcaattggcaatagctaatcagtggtggatttctgcaggtttggcagctgctgctccatttgaaacagcttaaatgagctaagagccaactcagcgggtaaaactgtaatcagtgtacaaacaaattgcactttcatttagtacataaagcacggtaatgttatgagtggatcagaactcacacgattcaagtttacattcagaagccagcaaagccgctttagaattacaaagggcaagttcccaagaggtcttgctgaaatctcagcctctccccaaatgttcatttcccacttccaacaactctctagagttttgatgtgtgaattgccgaaactttttagggcattgcttctcctgctccagcaagtgtgagtcactgagtcctgtgaaaatgcagaatcggattctggcctggagggaccgtgtgtctctgagcgtctcacaggggtgctggtgcagccacaccatgcccagcataggcgcgctgatcctgaaagccctttgtgtcctggaagcccctcctgttcgtgaaggtttggagagaggagaaggaagtcctgggttccaggggcgggggggcagggcggggtgctgcagaccaggggcagctgcgagggtctcagggtgcaaagccattcccagggaactgcagacctcaccggggcagcctggcctgcagggaggtcccaggggaggcgactgtgctgggccaggaaaccgccttctccttcagtggaacacaatccacactcatggcggaaaacacaggaaatccataaagacgcaaaaggaagccacgaacactctcatttatttaaaattggacaacttatttgaaattgtctataaggcagacatatctgagacgccagatgggggctgagcgtaccgagtaaagaggggctgaccccagacttctgatagacaggaaaacagcagttcccctaaacctctggggcccgggcccccgacacacaggctcctcagtactctctaaagtatgcaaggagctcgcttgagcaccaggggcaagaacccaagaatctggggctcctggtgcctgagactctgaaggttggggtgcatgagaccaggcttctcccacctcaaaccgaacagcctcagaggacggggtcagaggctgggggccagggtctctgtggaacctgaaggaacggagagagggagggagagaagcacctgagcccttcccagcaggcagggctccagccctgtgacccacccgtgccctcagctccagccagggcgggggctcatcggcccctgcccggagctcccccacagtttacagggcacacaattaccatccccacccagcaggagccggagtagagaagcagaaatccttcctttgttaatcattttccatcagaacttcgttttggcttggaaagtaggccacggccaggctgcggggggtggggaggcctggacccccacgcggctgctctgagctcagaagggtcagccgcccagttggaagcgttttattttctaactcaaatacgtatttatagcagaagagagatgctccaaggacgggctccctcctgccaggagctggagcaacccggccactgtgcacacagctctgggggaacgtcgcctcactgcctgtccttgccccaggcccctgcagtgacagacgggggctggcttttccccgagtgaaagttgtcagaaccaaaatggagacacttgtgctagaaccctggcaacggagccggaggtggccacgaagggggttctcacacacgaatgcctgataacaagaacggaaagactgtgaaaaaatccacaacctggcacaaaggctgctgcaacctcgcacagaaattgctctggaggacatcgaggtgccaggtgctgctgtccaatcacacctggagcctcccttgctgctggtcttggggaggcgggctccagctcgaaaggaggcacacaaaactgctgggaaacgggccgggcaggcaggggcggggccgggcgggtgaggacatggcttctgtgcgcacggcccggcgcgatggctggtgtggacccctacctttggaacacgtggggccaggccgagggggttccgccacgtctcctgggcagagcgccagcctcagtcaccgtgtcactgtgtgtccctccacaccccgagtcctggcaaaccaaggcagtgcaggaggacgcctggtgcccagggtgatggacatgggtagcacatgggccccatgtgtccgggagcctggggcctggtgcaccaggtctcagctccttcccaccgtgggttctgggccagttgcaggcagagaacagagcgggtgcctggctcaagccggccagtgtctcccccatgtctcagctccttcccaccgtgggttctgggccagttgcaggcagagaacagagcgggtgcctggctcaagccggccagtgtctcccccatgtctgagcccaagacccgagacacggcccccactgagactgggggtggctctgggcaccaatctcgtgtgtgggggccccccaccgcccacccccgcccagtctccaggggttgtctggggcactttgccctccccaaggccccccacgcccattcctctttgagccccgtgcccctgagtgtgccgggcagtccctgggagccctgtggtgatggcagccacacctcccggccctgctcagagtcaggggtgcccttcaggatgggctagccgcagcccatggaccctgcctcctggggggccgccccccaacacgcttcaccgccgccgcgccctgcccccggggcagctttcaggactgtttgtcaccaaggccagtggttgcaaaacaagtggggcctgaatttataggaacttagaatttctccagggcagaaggttgaataaatgcaggggaacgtcaggggcagatgaggggaacgtcagtggcagagctgacgcgggttccctccctctctcctggccgtggaccctcgcttgcagagaggggccggcccgcgcacccccggcttccgaagcttgtctccagtgacttattctcgtctgtgcagcggccaattctgagtttggggcaggagccctgggtggcccctcagatccctgcaggcgtccctcgagtccgccggccctgtctgccggagcagctgggctttgctcttcgcagataaagctcctggcacccgttccatgctcctcgggtttgttctttattttaaatcctttaaagtaaaaatctctgtctctctccctccgtctttctctctctcattatcaacttttctgctctcagaagcccttttgatctggagccttgagatgctctgtcacttagagacaagccccctgcttctctttttgacttctgtccttccctgtccgtcctctcccacgtggccctcagtggccccgctaacctggccctggccctggcttccaggtctcttggctggccttttgcattcatcactttacatttttccattttgagtcccaggaagatttatcaacttctcctcaaattcccgagttcaccaccagaaaccaaagttgccgtttcattttcgggctgttgccacgagacctgcaggctccagcacccacgaggcccatggccactgggagggacattggtgttcccagggtgtgagggcaccttggccggcatggcggggacacggggtcatgcccaccatgctggttctgctgatgccatgggcctctgagtactcactgccctgggtgtgcggggctcggtgcggggaagaagaaagtttagcacgagcgatcggggtggccaagagcctggcatgcacagccctgttcgggagcagtgtctgttttcttgtctgagcagtgctttgcagtgggatttgcagccgcaaaagttcttggctaagacgcttgtgtcttaggaaatgttgggttgcacgtttatttttagcttcaggaatgtgacacttgatattatttgggtttttgagagggccaatcctggaacactcttgcctaaaagtgaaggtgacagctccacattggaagatgcaagctgtcctgctctatcctgctctgtcctgtcctgctctatcctgctctgtcctgtcctgtcctgtcctgtcctgctctgtcctgtcctgctctgtcctgccagggtgggagtcacggtcgcacatcctctcactctcagggcctgagtagctgggaggcagggaagggaccatcggggaggggccgcaggggtcctggcgggtgcctggctggcccagggtggctcagggacaggcggtgcggaggacgtgcgttctggggtgtgcagaaggtggaggtgggagggcttattggggattagaggtggtgcaagataaagataggggtcaggaagggctccagactccggcctgagccacaggaggccggggtggcatcagctgagccccaagcccacaggagacagccctgacatatgggtcggggggctcaaggtgtctctaacagtccaacagcaacacagtggctccgaggaggtggacgtctgagtggctgctccaggctgccgggcagccctgctcctcttacctcagggccaggcctcctccgccttgatgtctcccctggaaaccccaggaccacatccaaagagcagagctttgggaaaggggaaagagagcatggaggggtcaactcaaccacagggtcctcaggggccctcccggtcacgatcctcatcgtgggagcagccctgccccaccctccacaggcaggtgacctggaggggtttgctgttccatggaagagcccctgggtgctgagcatgcatctgaagttcaagggcgagcctgggctacaggaggatctgtgggcatccatgctgggagggaagcgtggagacaggggccgtgggacatcttcctggatttcagagggaaaagcctccccaagctgctgcccttgctgtgggaaggagaatttacctgtgtcctgtggccagcagggactacttgtgaggtcggtggagttgttgggccacaccccggtcattgcaaccttggtacccaaggcagctcttccctgggaggcctcctgagcccttcagccctgatacgttttgcacattcttaaaacaccttagctgtggcatgcgggtcctacactcccccaaccctgtcgtctatcagtgacacgtctacccctttgattgatgtcctcagccctgggcctccgagttcagcgtcttcatgtcccagcagccagccctgaggcaggtgcatgagaggcccttggtacatgcttgtgcagttgaatttttaaaaatgagtgtggccccctcggaagttcatggaataaaactgttatctgggggtggggggtgatttgtttgaggctatttagtggcagagttggaatttaaaccatgatttttctactaaacaattctaaattgcctctcaggcactgttgggaatggggactgggttctcccagatacttaatgctttagagctggaagaattttcaaaaattatagttaactgaattttgaagaggtccatggagataccagatttgtgtcacaagaagggagttttccaaagaaaaggagcaactggagagcaagaaagagtctgagatttgaaatgtgattttcaaattcaatgggaagcctggaattcaatgggcaccctggaagataaagaggaagaaatttcctaaaatgcagagaaaatagacaaatacatgggcatatgaaagaaaacttaagaagtacagaggcttaatccaggcactccagacaccacctaataaaagttccaggatgataaaatagaaaacttgagtgaggaactactaaaataattagtagaagtctaggcacagtggctcatgtctgtagtcccaccactttgggagtccaacgtgggaggatagcttgagcccaggagtttgaggttgcagtgagctatgattgcaccactgcactccagcctgggtgacagacccagacccagtctcttaaaaataaataaataaataaaaattaaaaaaaaaaaagaataagagaaaatttcccagggttgaagaattgcagtcagtctgaaagacccaaagtgtcctaaacaggatgaaggacagggcaccgtacctggcacacctgctaaaatgtcagactatcaaacataaagagaaaatcctaaaagcccagcaagagaaagaacaagctaccacagaggcatgaggatcacactggcatttggcttcttgttgctgatgttagaagaacaagctactacagaggcatgagcaaccacactggcatttggcttctcattggtgttgctgatgttaggtgtctatgcaaggagcctgtaagcttctgaaaaatgatgatttagagctgagaattctatacccagctaaacagtccatcaaaactgacagtgaagttgaaacagattcagacgtgcaagaactcagaacatgcacttcctgggttaaaaaaaatttttttttgagatagggtcttgccctgtttcccaggctggaatttggaaattggcttggatgtaattgcagatgggccaggattgctcgagtcatcattgcccttttgtcttcctggaaagcacccgccagcagtacgaaggagaaacacatatacagactccctcatccagaaaccgagaaactgggaattgcccaggcctccaggtggtggggaggaagggcaggagggagagactaacacagagagagagggtcccataggggtatttctcaagggtggggccattgagggggaagagtggggaggctgcaaacaaggacccacatgcagtggccatggctctgagtcagggaagaagtgccagaggagaaatggacacacaggagtggccaggatcgttttttaaggaggtgcatctgaaacatgttatgaagcctccttatcgaagcagctcgggaggctggatgaagacagtagttggggcaacagagcaaatggtgcagacgctgcccagatccacacggagccccgtctgtgctccagggggaatgagtggtgggctgggcacctggagaaaaccgttggttgactttattcattgtcgtacagcagggtggattccagtgattcatgtaggtaatagttaaaaataacttctcaaaggcgttctctaagaatgggaatgttctttaaaactttagctgggaaagtctttttagtttttttttttttaatttttaaatttaaagttagaaatggtgggccggtgggggagggtctcaccatcttgcccaggctggtcttgagctcctaggctgaagcgattctcccacctctaactcctaaagtgctgggcttacaggcgtgagccaccatgcctggccagaaaaagtctttttaaacagtgatgtgaaacgcagaagctctgagaggctaataaatttgactacagaaaaataaaacagtttctgcaaaagctgttggaactgtattcaggagacaaactaaggtgggcacctcatctcacaggcaagagcctggctcccctcatgtagaaagagctcctggaactcaggaaggaaaagcgaccaatgggaagagggagaaagacaatgacagggacacatctgccccatggaagacatcgacatcccccaacacagaaccctggacctcgagtgtggccttctaagggtctttgctgcagagcccaccagatgtgcctgtgaggctggctggaaaccgccaaatgcccagggccagcacccaagaaaagagggaagagacgcgtgcacacagttcccctgggaagacagacaaaatcctgaaactatgacggcctgcagcatgcagatgctggcggcgggggtagggaaacccccaagctttttgtttgtgaacctgtgtaaaggtattatctactttaaaattcatttcttaaaaagaaataggctgggcgtggtggctcatgcctgtaatcccagcactttgggaggctgaggcgggtgaatcacgaggtcaggagatccagaccatccttgctagtacggtgaaaccccgtctctactaaaaattagccgggcatggtggcgggagcctgtagtcccagccactcgggaggctgaggcaggagaatggcgtgaacccaggaagcggagcttgcagtgagccgagatcgcgccactgcactccagcctgggtgacacaacaagagtccgtctcaaaaaaaaataaataaataaataaaagaaaagaaaagaaatagaggtctaaagcactcatttagagagagacctgggcaccccgggaagtggaactgaggcagatgggacacaggatgaggactgctttcaattttctgtacttttatttttatagtttgagtgtttgtgattacttttattccttaaaatctcattttggctcttatgtttgtaattttgtaatttaaaaaagtaaatggggtagaactaaatgaagtggaaataaagttgcattcgagaacagggacttaagaatagggtcgggggccgggtgtggtggctcacaccagtaatcccagcactttgggaggcggaggcgggaggatcacctgaggtcaggagttcgagaccgccctggccaacatggtgaaacccctgtctctactaaaagtacaaaaattagctgcatgtggtggcacgtgcctgtaattccagctactcgggaggctgagacaggagaacaccttgagcctggcaggcagaggttgtggtgagccaagattgtgccactgcactccagtttcggggacagagtgagaccctgtctcaaaaaaagaaaaagagtaggggtggggcgcggtggttcacgcctgtaatcccacctctttgggaggctgagataggaggcttgcttgaatcaggaggctgaggctgcagtgagctgtgattacaccactgcactccagcctgggcaacagaacaagaccttgtctcaaaaaaagaaaaatagaaaaaaaagaacagtatctgaaatatatttctgattaatagaggaactgaaaataagggctaacatttaaaaattcctgagactgaggaggggaaggaggagtgagtggtgtaaaaatgccaacattttattattcatagtggagaggccaaagtgaggagggaaaagcatttacaatttaccaaaaggaaaaaaaggaaagaaaatgaatacctgcttattttaaaattattgctactgtttaaaatcacaggtatttttttaatttaaaaaaggataaaataaaaaagggagaccaggcccatgtgggggcctcacaggcagcctcttcccagcaacacaattgcaccctgcaccccagccatctaggggcacctggcaagctgtggagcagccctaggactggcgggtgggcagagggtccgttgttatcaggggctgggggaagcccccaggggtgcctgtgcccctgaagggttcatggggccttggtgactgggaagggaccttctgtgccccaggatggtccacctcatgcaggagccctgtagccctgggtgtgctgggggcagtgtcctgggggcctggggggtccctgggcgatgctgggctctgcacagggaaggccatgagtgggggatgctcttgggggatgatgggaggacactctgtggggttctcttgagaggggtgctcccagagacgctcctgggggcatctggaggttgctcccgctgggagttcctggagtgcccctgagggcccccttaggccaaggtcaggcacaggcatggggctatggctacaggcaggagagagggtggcgggggggccaccgtcctctgtggacccttcagtgccagccatgctgctgctgctgctgtggggtgaggcccaccagggttgacagcagggcactgagtcccctccaggcaatgcacatccttcccttcagctcactgctctgtttgccgggcaggtcacctgttgacctctccggctgcaggcccgcctgtccctgggcactgtccccttctgtgtggagttcccctggccccctgtcctggacccatggcccctacctggtgcctgtgagggcacctgataggccagggcccagggatgactcccctccaccccgcagcatcaggacccttcagggctgccacctcctgggagccctctgtccttcgcagaaggagcccaaggcccatgtgctgctggggataggctccccagggtcccttcaaggtggtgggggaggctggcttgggggacctgccccagcagctccacctttaccagatgtatatgttggggtaagattttgtttgagaaaaaaaagagtttttatggctaaatgttaaaagggtgaacgtgctgaagccggaggggtggagagcaggacacgggctgacctcggggtgggaggccggcgcttccaggaaccgcctgagctgtgagggcacacaggcaggctgagggccggctgagccacctgggcaccagtggccaggcctgggtgctgaggagtcccttgcttctgcttcacggggcgtctagaaagtgcatctgaggctggcgtcccgcgccagcacgggggtctctctcctcctggatgtctgcgtggtgatgaaggtggaaacagcccccagggcagctcctgttactttaaggccctacacatgttcatttgcagcctgaggttttctgtctaaattcacattttgcagtttcactgagttactttcattcatttttacatttacatacagcagtgatctccatgcctgccactttcgaggcttctccaagggctttgttattttgttctcagagaaatcaaaaacagcagagacacaaatgttgaaaagtttcattttctggtcttctctgagtgcccgcccccccaccaaccccccagggtttctgggaagaagaagaaaaaaatgacagaattattcgtgattgggaaatcacttggctgtggcgggtgtggaagctccccagtgtccggagctccctgtgtggaaagttttgtggtgtgtgtgccgtgccctttctggagggttacacaacccaggacggacgcggtgggggcacagagggaatgacactcccttcccaaacactcagaagacagaagaagacgggagccggtgcagcccaggctccctgccctgccgagacctgaccgtgcctggccagcccctgccccagccccaagggactcccacgaggacaccagatcctccgggggtggaggagccctgcggtgcctgtgcggaggggcctgaggctggaggaggcctagagggctgat
